United States Patent Application Publication US 2026/0258423 A1 - sequence listing, part 66

SEQ ID NO: 301568 - DNA, 83257441 bp, Homo sapiens (residues 57,639,790-59,774,596 of 83,257,441)
  source 1..83257441: mol_type = genomic DNA
cctgaaacccaggaccagctttgaaggtgctgggattcaggtaaggccaggagcacctctccccatccccctgtgtctatcctgcctcctccacccatccatctctccatccttcctttaggtgtttagcgtatagtcaccaagcactatgtcacaggccctgccctagatgcgggggacacagtggtgaatgagaggtgggcccctgcctgcttgttgggaacagagcagcaaacaggattccactctggtggaaggacccaggaaggctcctctggtccagcccctcctagaggaggtggggggagctgggcaagaccctgtttcaagggcagcacatcagggcaggagggcactgggaaccatcagtccagctgaccagcacaagcactggggctccaggctccgcattcatgcctgtggtgaccacctcacagggcgatggccaccccagctgcttctccctggccctccgcaagcccttgcctcctgctgtcagattaacccgccagagttaagctcgcacttcagataagacataccccatcactcacaagcgaattatcaatgttatctattaaagccctttggatgtgaaatgccatgtaaattaataggattttagaataggaaggcaccaaagggatttctcagctccgctacagttattaccttgggcaataataataaaaatagaaataaatgttattattccacttaccaagcaacagataaccgtgctgagcgcccaacgccatcatctcactgaatcactgatcttcactgcagccctaggaggaggtgtcattaactgggttttacagaggaggaaaaggaggcagagagggaagttaagtaacttgtcttgggtccgacaactagttaagtgtgggagatgggattttaaccaccgttgtgtactattttctttaacctctctggacctagaattcttcatctattaaatgggaatagtaatgtctttcttgtggtgttatagcaaggactcactgagatgatgcagggacgctctgtggccatgaaaagtgctcagatggtggctgctgttgtgttatcattagtgtaatgactattttctcatcatcaaaaccaagctcttccattttacaggtgaggaaagtaaggaatagagaaggccgtcctcccatccaccttttcaacaagggctagagtgtagtggtataaactactggctgttgacatttttaggtatttctatactagctggtaaatggctgctgccctgagccaaagttcctccccaccatgctgggctctcccctgagactccctgactgctccacagtctagcagtaaaagggttggtggtgtctgcccttcaacatctgaaacaacgtcactcaggagacagaagtggtggagcatctaggggagggaacttaagatcacagatgttcatctaatcactgagctagtgatggggccaaagtaggaaacctggagtttttcagcaaaaaaagtcggagcgctcaagacttgagcgtttgctgtcctggttggcagaggtgagggccactggactggggtctaggatcctgctgtggcggattcattgaaaaagcccacgtgacatgaagctggggagaaagcaggcatggagaaggaacccagagagagtgtaagatttcaggggctcagcaagagaccctgttggaaggaagcaaaactgtgactcttctggcagttgggtgtctgaagttttgggtacagggagaagtgtaaaaagcatcggaacagggaactctggaaggatcaatggtcagaacattcgtagtttgtcctgacactcattggtggtagatgagagagtggctcaaaatcagaaattgccattgttatgagaagttagggaagaggagggtgtgattggaaagaaaaactgtcaagatagtttgttgatgcctcttttgaagctagaatcccttcactttgaaggtctcagtctgggtctcagaaagataggcagatagatgtttgttctgtggggaagtgggtgtccctggcctattgaggagccacaggctgctggcacagggtagcaagggctggcttcagaataaactccatgtggacattctctcccttgaagtcctgctggccagagagtgacgctgaaccaagtgtccttgtagggctgggggccagcgtcggagcccttgtaatgtgtcagccattcttgatgctagctgtctggccagcactgcagcaaaatgcacatcatccccaaggccctggatggtcaggccaatgatgcctgaggctggaactctccagggcctctgaagtcagggatctgtcccctgcctccacctcaatgggtagtaactagaaagaattacttgtgtcttggtcatgtgtccagggcccagctcagtagttttttttaactgaattgaatcaaagtggtgagaccttttgggggtaggtcaagatcatagctatggcaatacctccattttctttctctcttgccacttgatcttggagaaaaggattcattggaatggccactcctgcactcccatctctgaggactgagtcttctgagtgctctctctatcttcaagtggcatttggtgtagccacgcccaggtccttgagctcagctagaagaccctagagcagacacagccaatgcctggttccaacctagaggggtccaaagcacaggtcccccaccttcttcctggaagagtgagccacggcctcctttagcccaggcccagcttaccattagccagttgtctctccttgggcagttgatctgtgtgcagcctgtcctgggaccccagtcccataaatagagcccctttgctgtccacagctagcaactctaagctccatgagggcagagactgtatgttgttcactgctatgattccagtgcttagaaccgagcttggcctgtagcaagcactcagtatttactgggagggcacagggctgagaatgggtcttgagttatcagttctgctgcagctcactgcggaagttctgggtgactgcatgcaggtactgaatgctaggccccagccctctttggggagggatttagtgattcagcggtagaatgggcccagggagaaggctactgggccaaagtccccaaatagagctttctgcttcctgccccctgagagagtcgcaggacacaaactacctactgcagtgttctgagctccagctgcaagttggaattcccaggagagctttggcagtttctgttgccctggttgcacctcagacagattatatcagaatctcaggaggtagggcccaggttgtatttttcaagctccacaggggatttctggctgcagcccaggttgaaaaggtaccctactggaagaggggaggcaggaggaatttccgtggaattcagctgtgggcctggagcaccccctacgagtgggatgaaaatgccccctctcagagagactggaggaaggcgtgagctctccctccgcagcccaagacaccacgttctgttgtggagacaggttgaggttgagaccaaagcctattctcaagccgcagaatctgtttgccaaaaacaagatccagtgttgcgaagggccccgctgtgggcaggcagggagaggtctctccctactcctggtcctctgctgggtcagtggggtgggacaggtgctccgctgtgtttcctgagtgcttcccagttgcagggaacctgcggacagacacacaccttccgctcctggctgggccccctggttccgcacttgcctcttctgaggatttctctgttgcttcccaggggtgctgcctaacttctattttatgcttccacaaagccattcatccagtcagaggtgtcctgacagaaacactttctgaaacctcaacaaaggtttgacattgcgatgcaccttccttttagtcctatcagtctgaagagttacatacatatcttttttaaaattaagctaaacagcagttgtattaaaaattatctggggcacttttgtgccatccctgtgttttaggaactaacacccttagggctcttgactgcaggacctctctcctttaggcaacaggaccaacctgagccaccaacctctcacccttcccagcaggcaggcctggccttcacatttggcccctctccggagggacagatgacaggttccacgtgcctgtcattttcccagctgcagctgagggcgagacattgcccccccaggccatacactcactccccagcacccccttccccaaccagcagccgcaaccttctctgtctgggggtccccatgggagtgatgtgttggtacccttgggaatgtcaggctttctcccaaaaaatatgtgtttaaaacagattcctattttaaatgccaaggacgccagggtaagttgtttttttttttttttttttcaaatggaaatacatcttccttcaaatcaaaatgtgacagtctgatcatgtaagtgtgtccctttggttatcaattgttcctcctctttgcaccccctgttctgatgtgagtcccttggtcctcccactccaaacatgtgccatccaccttttttccactctctcccctttgcagcctccagccactgtctttctctgcacagaagtcagggctgtggatttccttgaaaagaaccagccctgtcgcatcaggctggtctgcccgggaggtgggagcatcctgggccagccaggatgacagatggcggtgtttccaaactctcgtaggacatgtttcctacattctgggtgacagtttcttcttttgcttgcttattttttagtgtttggattcggtgaagcaacattgggtttagccaagaatgtttgaaccatctatagaaattgctgctggggagatgcaagcatgctggggaagggggtggagagtgctttaagtaagcacaacataggaaaaattgtttcataatggaccattcggggccggtgatgcatattacaaaagagtcttttataaagattccccttaatcacacctattcaagccagaaggagcctcagaattctctcatctcctcctttgagagaggcacagaggggccactgactcatccaaggtcaccaaaataagtagcaactgggccagaaccataccccaggcagtccactcccagaccagtgtcttctcagaccaagaaggggagaggaggcaaagaaaagggttcatgacgtaatactccccagcccatgggacagagggcaataccctttcagtggtaactaaaaacaaagaccccaaagcttcctctaaatcaagggttctctgcctacactgtgcatcagaatcatccggaaggcctttaaaagacacagagacccggctcccacccgattctgtgggcagggttggggccagggttaaagctcctccaggctggactgagaccactgcaccaagtggagacatcgcattggctctcacaggggacaggccacaagagttagccccctgtattctcaggagcccctttgcttctgcaaagtggaggggctggcagactgaagatgtgtgccataaatttactttttacaaccttgggctgtacactggggtcatctgggaagtttttttgttttttgttttttggttttttttttttgagacagaatctggctctgtcacccaggctggagtccagtggcgcaatgttggctcactgcaacctccgcctcctgggttcaagtgatagtcatgcctcagtctcctgagcagctgggattaaaggtgcccaccaccacgcctggctagcttttttttttttatttttagtagagacagggtttcaccaggttggccaggctggtcttgaactcctgacctcaggtagtcctcccgcctcagtctcccaaaggcatgagacaccacacctggccctgggaagcttttaaaggtcccagtgccgaggctgctctgcagaccaagtaatcagaatcgcaggggtgggacccaaaaatcagcatttgttaaagctttccaggtgggtccagtgagcaaccagggttgagaatcagcacccatacagagcagggcactcccatttgccatagctgtgtcccatctgctggatgaatcatgcccctggacccctccagggacgttgaatgtgcccccactggggtggaggatcgtgggactagggaggctacttcttgtaggcagtgctgcctttcagctgcagtttacccagagcagtgactcccagcccataccctcatccactgcatcagagcatcctgaccatcatcaactgatgctcattgacagtcttctgtggggaagactctgggctaggtcctaagtgggacatgtgactgagtccctgccctagaagagtttgtcacccagcaagagaaataagatatgcacacaaaaataactgtgcttaggtaaggaagaagctggtaagtgccagagaagcaataaaaagtaagtgtggtatcatatcatcctcaaattccccaaaacccaaaagcaccattgacttctaatttgcactagatcatcacaactccaaaaagtccagcaaagtgtctcatccactgtcagcaggttggtgacatctttcacttagatgagtcactaaccccagagctgtgttagcaccaacctcagaggacttgggtttatcatcctcctccccgcagacaagctcaagcaaggtctgagatgaagggacgttagaggtcatcttgcccaacctccttgcaacagagaaaagttacacagggcccgaagaagtgaagtgtcgtgtccaattgcacagcaaagcagggacagccagggctgaaggctgggctttgaggccaagggggtgattcttctgttatcccactcgaagggcagaggaactccattctagcaagaatgggtcttcgagtctgacgcccattaaacaagatggttcccacaagccgtggcccctgttcatgcctggaattccaccattagtgcttctttcttttttagccagacatcctcgttttgaatataaggttcccaaacagaggagcataacacattcctagtacctaagttccaggtggtcaacctatagctctcaggccctctgagatttgatcagcaaaatgattttctcttttctgctggatttactaacatatgataggtattaagccactagggtcatgcctgaccccttggcccacttgtcattgttagagctaaacagaatgtgtattctaattttgagctatgttaactccactaaaatgatgctatgaagttgggatattatgaaggataccagaccactgtaatcaataagaaattcaggccaggcacggtggctcacacctgtaatcccagcattttgagaggccaaggtgggcagatcacctgaggtcaggagttcaagaccagcctggccaacatggtgaaatctcgactctactaaaaatacaaaaaaaaaaaaaaaaaaaaaaaaaatagccaggagtggtggcacacacctgtcatcccagctacttggaaggctgtgacatgagaattgcttgaaccctggaggcggaggttgcggcaagccacgattgcaccactgcactccagcctgaacatcagagtgagactctgtctcaaaaaaaaaaaaaagtaaaggaaaaagaaagaaattcaggccccctgtgtgcttactaccagctgaccatggctcctaccttggagacagtggaacacccctgcctggtgaagagtcctgtcttgaagacagggctgatgcctggacagagacctggtaggcct[141 bp omitted]cgtgcctccgcctcccaagtagctggaacagacatgcgccaccacacccagctaatttttgtatttttagtagagacagggtttcactatgttggccaggctggtcttgaactcccgacctcaggtgatcctcccgcctcagcctcccaaagtgctaggattacaggcatgagccactgcacctggccaaagagtgtttgttggtttgtttgtttgtttgtttgtttgagacagagtcttgctctctcacccaggctggagtgcagtggtgcagtctcggctcactgcaacctccaccttccaggttcaagtgattctcctgcctcagcctcccaagaagctgggattacaagcatgcaccaccatgcctggctaattcgtgtgtgtgtgtgtgtgtgtgtgtgtgtgtgtgtgtgtgtgtgtgtgtgtttgtagtgacagggttttcccatgttggccaggctggtcttgaactcctgacctcaagttatcggcccaccttggcctcccaaagtgttggggttacaggcatgagccaccgcgcctggcctagctctcactaattaagctaactcactgccaggcattcatctaagcactttgcatatattaatcctgcactaaaatggtcatctcctttacagttggggacatcaaggcaaagagagcataagcaccttgcccaaagtcacacagctagtaagcggctgagccaggcatcgaacccagacaggctccaggtctgcgtgctctgctgtttgctgtgctgccctgcctcaggaggaggagtctggtggccccttcacacattggccagggaagctatgttgaggagggacccccccaccacatttccagcagtggaggggtgatcatttcccactctgggcagtggggtgctgggcatctgtgggcacccatggaccaaggagctctgccgcagctttgcttggcccgaggccctatgaagaagccttgagccctgccagaccacctgcctggttccctgcagtcttcccccaagcactctctgctaaggcagtcccctccttgataacccagcccctgctttcccaaggaagtagcctgccccagatgaccccggcctcctcagggcctgggggaaaatgctgaagacagtgccacgaggccactctgccaggcgtctctcccctgcatttcccagccctcccaggtccagccccagagagttgtttccaccaggggcctcctggtcctcaggcccctcctgtgtcctgcgaagggcctgtcctggagacagcctgtgccctccgtcaccacagccttaggctcaggccaccaggatgtttctttggcctctggcagccccagctggggtgcccctagtccacccaacacatgcacaacacacatgtactcaacacacacatctacatatacccaacacatgtacacaatacgtacactcaatatacaacacacacacccaatacatacatacactcaacacacacatccacatacacccaacacaggtacacaatacgtacactcaacaaacacaacacacacaacacatacatacactcaacacacatccacatacgcccaacacatatacacaacacataacacacatgtactcaacacacacatccatacacccaacacatgtacacaacacattcaatacacacacacacacatccaatacatacactcaacacacacatccacatacacccaacacacatacacccaacaaacacacattacacacatacacctgacacacatacacttaacacatacccaacacacatacacttaacacatacacacccaacacacacaccccttgtatctgtgcttgcccatctcccgcaagcccagccaccaagaagaggcctggccctgggaactcagtatcaggggcctgtctgccaggtcatatggaaaatgtatttggcgggtgaggggtgactggtgaggctggatggcctaatggaacaggagggggatggcgaggagcagcagaagggggccaggaggacggctgtgcaggatgctggtgcaagctccatcccttccctaccaggaggctcccaaggggctaggccaggttttggcaaggccctggtgtttcagatgtagggcacagaggcagtggggtggcgactatggagctgctgcccgtgctgtgtgagggacagattgggcagccctgctccttcagcccctcttctcacaccctccctctccagggtggagatgaaattccagccctcagcagtgtctgatgctccacctccagcaggagcctttatttgagattaaggataatggatttcctttcttggataagttttttttttcttcctctttcagactttttgtccaaaatgcactcaattccagaaaatggaccttttcttaacaagtctttattgactacactcccctcccccacttcgttcctctttccccctcccccaagtctttccgtgcttccaaggaaacccgctgttttcagcgcatggtaaggagtgcaaaggaatgactcacctgcaccctctccctccagcatcccctgggccttgctcttaacagcagcagaagcctgggtgtcctgggggttgggacagagagaaataacttgacttcttccttgtgtttcttcagcaatttctgccaagaccctcatcttcagaaatctagatgctgcctggaagaaatggggagaggacttggttgggggtccctcccttggtctccctctcggttcattgctgccttctggggaagggagggcctccagtcaccatgcatggtctccatgggagcttggagacctgcagccagggacaaccatacatttatttcacctggatctttctttttcccccttcaacagccctattaccatatttaaatgcaagtatgtctcttttcattgacattttaagtagcttagcctgacctttttagagtagcatgttccccctttgaacttctttcccttcagtagtaccgtgtagctaggacaatagtcttagtgtttagtgggcttctagttcgctctgtttgggggagctttgtctctgctttcttccctcctctgctccctgcccttgacggtgcatgtcttcctctcgtcctgtagaaattccttgtttaaaaggctcagtagctaaagttgagcagccctgttgggggctgtttattgagtttgcggctggcttctggcacatcatttaaaaccacagtgattggaaatgggtcttggggtcaggcctccaagcatctgcctggatggcagaggatgtttgtctttatatgtatgggagtgtatctgtgtatgtcccagcacgaggctgtgcgtgcacgtgctggtggctgagagaagcccagggtagggaacatggcatacttcatctggattctgcagctacaagaggttaccttggcctcctgactattattcccgttgctgggacatccttgctgcccggtgcatttttagatagcataagccttgatcaagaagaaatccagggacccgtaggagaccctccagtgccagcttcatctagaccgtggggctcagaccgaagagccacatctaaattcccacaattgcctcaggaggttgaaacaccgagagatcaaataaagccacagggctcaccccacatagacccctgcagccccgcactcccttccctatctggctccatgtgtatgcaatcacctgggaccccccaatgcttcaccctcgggcctggggctgtgatgctgctgacttcatgttttgacaaaagtctggagttaaaaaggccatgctaacctgcagagcctttggagaacagctggaattaagccagctcccggccaaggtgcctgctctgtcaagaggccgtcccaagtgcctcctgcctgtggcacggggctgaccactccgccatgatctctgccaggagcagtgggccagcccagccatgctcagttctactcaagacaaccccaggggagccactgtgtcgatgcacggccaacagggagctcaaccctgcttctcaagaaaaaaattcctcctacaattcttgaattattgttgtgggccttctagaaccagcttctggggtgacaaatgggtgagaatcaaacgcacctaaagatgttgtgccttccggaagcctgacagccactactctgtgtccctctcaaaagctgccctgtgaaaatcccttcccactcctgtctttgtgtggagggcggggggttgtgtggcccgtgacctaggtctgtgcctggccctttcaaggattcctccatgactcaggctcctctctctcctgaccaggcttcccagcagcggcttatggaccagtggcagcagcggcggtggcggcagcaagaggatcaggtaggaaggtgtatgggacaggcgactcccaggcatgcccccagtgtgcagggggaggtcaaggccctgtcggatctgtgtggctgcatctgtccaacaccactctcaccacagccccggggagggggtggacggggagggggtggaccgggaggcgcgggcaaggcctggccacccagggcacttgtagtggggtcagtcacagtcatgggactgcaaactaaaggcagattattattctctccttgaaaaaaaaaacaaacctgagtttctttttgactttgaccatcccgtcacctgacagctagcttcgggtacctgtggtcatttccctccttggcttttgctaattcaacaggctcccttccttgggtccctgagccagccagagaagtgctaggctgtcccctgggaccctgctgcactggtaggtgggcttgctggtctggctaaacccccagagcccctgaaagcagccatgggaccagccctgggcctcagtgaatgaagctgctgtttctggagccgctgtgcctcccagactcttcttagccagactcctcagctccagctgccaagggaattgggctttctgtcccatgaggttgctccagtccttctgtctccaaagccaaccttttggaggtctggaacccctcaagtgacatgggaacactttcccagcattatcatggggtcaggccagagctgggatatgtccagggtgcccggggtcccttttgtccctctccccagaatgctttctgccttcccaggcaagcagggcttctgctgtgccctgggctccctccccacccctgctccctgaactgagtggtcatggtttgcagctctgtccccccacgccccacggacagggctctggagcacccagggaagcgcctagtttgatgtcacagggctctgaggagggtggggctgggcagggtggggggctggtgagggtaccaggaaatagagcattaaaagcccagagggcaaatgccaagaacccacaccctgggtgatgagaagttggcacagtgaggcccattagaaaacttcagtaaaaatccgttccatgcaaactggcactgcctcgagctacaaaggatccactcccccgaatcatcccattggggttttgtttggagggggctagggagttctcaggggttgccgagggtcagtttgccagagagctagcaagtgggcagactggcaggcaggtccagagagtggggcccccttcctgagcttctgctcaccacagccagtgtccaaaggccccacctgccctctggccagtgtccctcagtccccccagccccgggccccgggggcggggtgcacagctgcctcgtgtctccctgtgccatttggttttttaacttgagtgctttttggtatcattataaacaagccttggccctacctgtgcctggggttggggaaaagataaaagaaaactcttgagatttttgagtgttgttggttgttgttttctccgttcagtttctttctttttataacttggattatgaaactaaactttaacccaaaattaaccctgcctctctccccaccccaccccgttctccttgacttcatggcaagtttaaagggcagcatggggttctttatgagtctgagagccgtctcccacggtctgtgcccccttctgccaccctaccctctcatggactcccagagccaggtgggagtcccacccatccctctaactcctaacccccaaggtcatctccagtcacacatttttttttttttttcgggatcaatggtgtttgatttgtagccatttccatcaggagcaaagtctctcccagcccattctaggtcagccatgctcatcgctgcactgttagtgaactgtattcaggagtgtgctcccagaccacctgcccacaccagcctgggttagcgcaaggagtaaatcctcaactccgaggtgcccgccccgccccacagggtgcagggtcagcctggaagctacagggcaaccctgcagtgctgccgggcagggtgtgtcaggggcttgggatgtgccccagggcaatgactagactgtatccaccatagtgagagcgctgcctaggcaggaagacacttgcctgtgtgtagccaggctaccctagttcctcagccccactttggacctggaacagggttacaggtttgggaaaggaagcgttctgcctttctttcttttaacgcattctgccagtaaggggactgtcacctcactccttctagaaaatgatcgggaagccaagcctgatgggatggccaattatttacctgtgggtggcctctccgtggcaaaagctctttgctctgaatttcgaagaccacaaagactcacttgggtgtgtgcatcagtctaggccacagagggctcactgggtgttgatggcctagtttcaccttccccagctcctgaagcccttactcaccccagctcctccccaggatgctcctgcagcctcaactactgcaggtcagcatgaactcaactgcattcccttatagggagacacagggagacattcagggagagtctgttgagtacctaccttgaacctggtaccatgctaaacctggcaggcaactccaaacagtagaaaacgtggcctctgctccccaggggctctcaggcttcatttagggatcagacatcatcctatggacggccctttttttgtctttgatttttgtctagctccaacgtttgggtttttttttttttttttccttccattatgacttataggggaagcttcctgaagtgagaagcacttgctgagggccgtggggtgggaggcagcttcgtttttgctcagggtggcaacttggatccatcagggctatggtgtcagggtaggaggtctgggggggccttgaggtctgtgcccacctcagccaactcctctgggccagcctgcccacctgttcctaattcccctaggacctgaggtgagcagggctcaggggaccccaccaggtgaggtccctgccgactcctagataacttcactatcagtggtcacttttcttttcccttcacctggtagtttgaaatgtcatcttttcttgtgctcagtcgagagtttgtttgtttattttgatcgtattcattcagttccagtggccccatcatgtcccacccaaacctaaattcagtttgacagaagcctcccccgacaggtgagggaagtggtttggatattcagggtattttagtttggggtgacattatgggtgggtccgtgtatcaatcttagagcttctgagcccctggtaccaccccgtcccacctctccccacccacccggccccagccaggaccccttactgtactttatacttgccagctttattccaatctagtaacatgagctcctgatggtggtggtgagtgtgagcagtcatatttctgttgtcttttctcttgcttggttggggctgcggtgagagtgtctctgaggcatactttcccgcctctcttacgctaggatctgcacacctcctctcaaacactcttctgagcacgctcagcgggaaggtttgtccacacctattaatcctctctcagtgtccagcttcctgttagtaccagctggtttgcatgtttttgcttgttcagatgaaacagttcaagaaacaaactcatatccaactctcaagaaatgtctttttttgtacactttcgtttttgattttttttattagttacaactccaaaacacctgttgtccagtaaaacatttcacacctcccctgcctgttcttagattgtatgtatctgtgggactgaactaaatgcatgcaccgtagtagatgtactggtagccgtagctgtagttgtagtacatgcattgttgagttgatattacagggtctttgacggctcggcacagcacggccgtctgaaggatagtgcggggaccaggaagagaaggggctccatattttcaatgtttccaaggggcttggatccatgttctcaccatcagccaccaccacctcccctcacactccccgttcccccagtccagaactgggtcaccaccctcagctctagccttcctcactgaggtctctgttgatatcgtccaattatagtgcaaaaatggagccaggattggaaggagtcttaaaggtcttccttgttcttgtctttctcatactattcttgaacagagcagatctttttttatttcttaaggcctaccagcaagactccttcaagcccttctactccttgagtcctttggcaggtcacagccagcccttcagggatacgggtctatgtggcagtcctgtctatatggattacttcttggggtggaggggaaatgagacatggtaaggaagggattgagatcttgagatccttggtctgcagacagggaatgcacttggccctagtgaatcattgctatttgttcttagggttggtgaaggttaagtagggtgagagtggtgacattcttagcatggaggtgactggcacagtttcgtggagacagaaagggaggtcggcttggaacatccaagaggaaccacccctagtttcctccagttccccaggaaggctccctagaggggaaaggagcagtcctgcagcctgtgcccttagaacaggagcacgtgctgccagtcatctttggacatgccatcttccctacatttgtggtgacaagccataagggagtgccagaggtctctcagagcttctggaggtgtccctactctttacgtgttgatgctgagtgagtagtgcctgcctcctggaacctgctctttaagtcaggatgtggtggctctgcccagtgctgcaagaacattgatggaacacaggtgggatctgaaccttcagggtgcaagttatctactgtgggagacagaagcccaggaaaacgtcggagtccataaagtcccctgagagaatgcgtagagatagagcaaaatggtagcgctgtggaaagaatgtaccatgctgtggaaattggtggcagaatcggaatgaacaaggattgaatgtgagtaaggccagtctgccaccaaacaggatgagggtgccaaggcccaggaagataaatctggaaggagctgttcttctagcttggcctgcatgggggtgcgggtgagggaggtacacagggagatggctggaactgtcaggcttcagggctgctgaagctgcaaattggcccgaggctggggagtaagagaagagggtagggacagaaggcagagagagcagaaaatcccctcccactggcctaaatcccaggtctggttctgctaggaaaatggctttgctgccctgtggctggaaattctaagagctccagttccagttggtaaaatgagcaaaagtaaaatgcaagtcaggggatggaataaatagtttaacttgaaccagaagagaaaatgctttagggaggagaatagatctcaagaagtagatatgcccatcccaatcccccttcaagatgttttctgtgtccccactgctagcctctgccttatatatgttaggggctgggggacatgaaagatagtgtcccacatacactcttccacttgctggagggatcctggagctatttgggtcagttgtaccataagctttagggttcccaggtattgctttcaacatgtatttattaaggatttgttttgtaccaagcaccaaggaatataaaggcagatggcatttctagccttcagtggcctgagactctggtcctgtcctctgaaagtccgtgtttcccacaatgcactgtttctggcctcagaatgaccactgtcagcttcatttaaaaaaggaaaatggatcaatgtgtgccttcatttctgaagatggctttcctgtgcttcatgagcaagatctgatggggggcggagcgggggatgcagtgcctccatctctgcttcctcacccagcctcctgtgctagcagcaagcatcctctgggggctgtggacccaagatggtccatttgtgggtaaggtcatggggacacccttgtgctaagacaaagccacatctgtggccatagaatacagccagtagtggcccagggggagaacaaatctctgacccactagggccagccaccacaaccagacttaccaaaggatcttacctgaacacacatctctcagtctactgccatgtgttctggggatggatacctcgtttcccagtttgtcattaaaatgttcatttctgggagagccaggactttcaccataaagagtccagcattggatttcagtaaccccagtgaatttataataatgctgacagctgcccgctgctgacctcagcttcattcattttccaagggctttcagaccaaacctgttgaggataaaatacatcagctctaatcaataattttgtaatagaaatactgtgcacttgataaatcaactctagtgcaattagtgactagccttgaagcccagacctaagtataagttaatcctaaagtgaatggagtgggggaatgttaatggtctttcaaatcagtggaattattttcagtggttgacacatctctgcctgccccctgagctggttggtcgttgctcttgtgtgggctcaggagctcaggcccagctgtctggagcaggggtggaaagtgtggtggtgtccttcatagctccataagggcgcgcagagcacaacagagaggggtctagagacccgctccttgcaccctgggctgggtgggggcactgcagggtctaggaggcccctaaagctgatcaacctgcaggttggtgagaaccatccaaggagcatgtgcccgggtgtatcattcatggttgcttgtgttttgcagaggttttttttttatttggttggttggttggttggttggtttgttgttgttgttttgagacagactctcacatgttgcccaggctggaatgaagtgcagtcttgaactcctgagctcaagtgaacctctttcctcagcctcccaagtagttggaaatgtaggttcatactaccatgcccggctttggtttttttgtgtgttttttgttttttctttttttgtttgtttgtttttggtagagacagggtctcactatattgctcaagctggtctcaaactcctggcctgaaatgatcctcctaccttgacctcccaaaacactggaattacaggtgtgagccactgtgcctggcctctgcagagttttgactttcagatatacaccgtgatgtatattaccatagccaccctgggagacggtcaggaaggcagaagtttgtggcctggtttacaagcatgtttttgttttgtttttgtgagaaagctgggctacagaatggccatgtgacttatttaaaatcacacacctggttaccggagagcaaggctttggttaaaggtgaagaaccctggacttgaacccaggtctctggcctccttaagtagccctctggagaagccgtgttttttatgagggacacacctgccccccaggacaccgggcacaagcaggaataaagaccatgtaggaaaaataataaaataaaataaaagcccatgtagggacagcccaagtagcctcagcttctagctctatataggccaagcgctcagtctctggcctaaaacctcatagtctgatctttcagatgtagatttcagaactggacctacgggacatctgccatggagttgaatgtggcagatatttattaagtatataacaatagtaattattgttatatgtggtaggtactgtcctaagcctgattcaagggtgcttttgactgtatcagaaacctcccaactctgattaaacactataggttaatgttacagggaattaaatattatgggggatttattggctgacatcctggaagctccatagaagagtgggcttcgtgcctggcttgttcagggatcctttttctgcaattctcttagcttcgccctccttctcatttcaatactgtctttatattggttttcctcatggtggcaaaatgattgcagcagtttctggcatcataccgtcctgtccagaagaggggagtcagatggtctggaatgctaggaagagtccagagctttgtgctgcttggctaaggctggggttacaaaaccagtcactgagggtgggatccaccccctctaaaccgaatggctctttacacggtggtgtaaggatgggttcccaaaggaaaacctgcatgctgataagaggggaaaaggaagaatgatgccagagagacaaccagtggatgcccaccacagccctggaagttcctggaagttcatggataaatactaagcagtctccacgccattgaagatctcccaacctagtgtggaaactaatgggtaattacaataggatgccataagcccggtaacataagcctatccaatgaacagaagtagcacagaggaggaagtgatcagctttgtctgggaagtcagggaatgtttcacaggggagtgaatatttccacttttaaaggacaaataggagctccccagggggccggggaacatcatgggcaaagccaccagacctcgggacaatggagtgaggtggaggccctgctttattctggctggagaataaaatgcaacaggggagtaactgtaggtaaagccagagagctgggcagaatcagagcaggggacccttggtactacgctaaggagactggatttacatgggcagggcctgtgagatcatgggaggcctgaaactaggaactgacatcagatttgtatgttagacaagctttgacaacattgtccaggatggattcaagacgcaggactgaggtgggaggacaagttacagataattcgtgtacattgtaaacactccatagatgttagtatatagctgctcaagaagcagtaggccttttgctcttatccataagacgattaactctggactcaacatcatgctaggggctggggtgggctgcagaataagtccatggcatggtccttgcctttagccgacttccagtcctctggggaggacaaaagtacacaaccgatgtgagagctagcctttaataaggatagattcctacaaggtcagagagtacccagaaggcaggaagcttagtggaggaggcaagacatgacacagggcctggagaatttggagtgggaagctgtctgctaggcagggaatatgggcttgaagagatagagacagtcaaggttctgggagatcttgaaagccatgttgatatagtcacaggagagggaggttcgtattcttcatgcaagtggcgctcagtaaggacagaaccatctaaagaagataagcctggctgtagctccacaaagaacagcctgacccctaatcctggggtctggggctggggctgggctcgtgacctggagcaaggggtgtggagtgagaggcattgagaaagcagacacaggagggcattccatggcaaatctctgccttagttcccttaactttcctttgcttctgccaacaagttgttatttattccctgcttggggctattgtttcccattcctttgcccttgaggtggccactgtcccctttctttctgccactccatttccctctgtccttgtctttgccctctctgtcaaaatttggctcaaagtgccagaaagccatacctgattcaccctacctggggcaccccctcctttgcccatgtcctcagtcctcttcctcatgggtgagctctcctgaatgaaaggtgagattatgggtccttggaagatattttgcatgtgtctgcgggtggcacctgctttccccaacaatacaaaccatcaggcctcccggcggcaaagtcagcctagtcctcattcttcatatggataagtaattactatgcaattagaaaacacagaaaatgaaggggccctttgttcctggttgcttattaatattaatttttttaaaaaggtctcccttcccagcttgggatcctacagaacaggaagcagacaaataatgcctttgaacagctgtgatgggctgttgaaattagatctgtcaggggatgagaacaccacgatggcagccactccgtggtataggctaagagggttccaggggaaggtatcttgtaagtggtcaatagaatgctagagacacatcctagtcaatttgaatacaataatgataatagatgttaataataatagctcacatgtattatgagtgagccaagtaccatgtcaagcccacctgccttatcccattaaattctcataaccctatgaagtgagcactgtcattctcattcccattttaaagatttaaaaactgtagtttggaaaggatagtagcttatctgaagtggcagagacaggatttgagcctaagcctgtcgtcattctgtcctctaagccactgtcagcggacgctccatcgtaccagccctgggatggctgagccaggctctgcaaccttaaaacagacactcaagaaaaaaccacagctgctcttaactaaattctccattatccttgggggaggagataaccccaaatcatttacgagtggcctcaggaggcggtataagtattttttgcacctgctcctgctgttgcagacactgcctggctttggctgacaggtttctggtccctgaatgcactcagaccaatgtcagacaaaggaggccgggaggaggcgtggtcgtgtaagaggaagccagcctgaagagaattattggaagggaacctttagctgaaacaaggctgagggaagttagccaatgcccagaagaaactaggcgatggagcacgggcgggcttctctgggaagacagacgtcctctgtagggatgagtcaacattttttcctgtgggctgcgaggaccgcttctggaaggtcgctgggaagccccgcccggccttagggctgggaggggattggctgcccagttgctggggctttgctctgagccagtggcggggtggaggggcggggccaaggcgggagcagcgggcttcttggccaatcatcctgcagggaggctgggcacccggtaccatggcaaccgcgagcagggcctcatttgttttgtagatgagtaattactacacaattagagaaagctaaaaataaaggggccctttgttcctggttacttattaatattaataaaatggtctgcccaggtctgtggtaaacatttgatgcctgcgtgcctgtggcagaggcttgtgtagccgggaaaggcaccccagccccgctcgcccctctttcgggaagttatttctgactatatcctggagagggtgggcttctgaccttggggagaagaggagaggctcagtgtgacagacataggatccaggatgtcctggagtccgggtccgtcactgactcaggtggaaaggtggcggcagcgtcaccatccttcagagaaaagacagacacacagcagcaaagcagacactatggaccggtgtcagaggaaacccctagtccagttttgctgtgtccttctgtgttttctggcttttgattgatcagctccaggtgtgtaaaatagtcgttaagtcttcaatggaggtagcccccaagactccagtgactcccctcccatctggcttaaagggcacattccgttcaggcttggaaatgatctgctggaggtttacactgtgttcagggttgtccccgtggctccccatgccctggccttcgaagttaaagcagctgagaggcttgctttctattccttctccctcctagggggagaggttgccttgttgattactccagtgaggatgattaacagcttaaaaaaaaaaatagaggcagcataagagcatagaaggcagagtagggaatcagaagacttggttccaggcctgcttccacctctactaaacgaggaattcagactaaagggtccttgggagccatttcagctctacagctctgttttgctgctgtttccaaagctggaaatcccttttccttggagataggaaca[140 bp omitted]accccatctctactaaaaatacaaaaatcagccaggtgtggcggtgtgtgcctgtagtctcagctactggggagactgaggcaggagaattacttgaacccgggaggcccaggttgcagtgagctgagagtgcgccactgcactccagcctgggtgacatagcaagactccctctcaaaaaaggggaaaaaaaaagaaaaaagatctgagagaagtgagtggagagaaagccaagaggttccaggtgataggaaacttcgtgggaatttgaaaacagccatgaattgtttaatgcatgaaggcaatgggagggacagaagcggttccagaactgtgtatcattttacacatctgtcctcagacttccatccttgggtgtggttgattaaatctcttagggtttgattctgtgtggatggtattcatgaataatagtggacctgttaatagctgctgtcaatgagcaaatcaacccagagattgtggccagttcagtggctcttgaactttgctgctgttcctaataggaactttgatcctgttaggatcacctggggagtttttaaactgtgcagtggccaggctgcatcacagacccatcaaaccagaatctagcagggtgagcctcaggcaggcccagtgtgtaacacggggctcaagtatcatcatgttcttgctggatgtaaagctccataacatctttgtggctgtcactggtaccccagcctcctctaactgggaggtggggaggtggggctgggatctctagcctgctgctgtggagcccacggctctccagcctccattagtcttcccagcagggtcaggaaggccaccctccagggtggaccaaggggtttttgtcctcatagagggaccctcctgtctctctcgaggacaggccagtcctggctgagattaagggcatgtaccagtagaactagcagcctgcagcaactgtaaacagagaagcagccgccctccttgactgaccaatgggagccttttggtaaggtcggagtttgtttgttattaaagacctaattagaaacatgagagggagctgaatggctctgtgcttggctaattagtgacatgtatgcgcctgctttgaacttcaaggacacagaactattagtgcttacatcaaaaatggattaaactcctgtgcttttataattattaaaaaggagctactcaagtggaaagtcttttgtgtgggtcctcaaggggctgcccctgggataacttccccaccccaccctgccccctgcctgctagagccccagcagtgagttttctattagatatgattgggcagtaaataccgttcagccctagggtgtgccagctcccaaaaggacttggctctcagcagaatggagtggtcttttaggactgagatcagctctctgggtggccccctgggtccaggcactttcctggggtgggggaggggagttctagcgagggcccagggttaaccagggcttactttccctctggcagtgccctctctgcttccacgctgaccccaccagtactgcaagtctgcttattctttgggctgtggcgtagtggagggtggcctagtcctcaggagagaggcagtcctgtatctcttggggcagtcagatcctgacctcagggaacccccaccgtgatggaagagatgtttccactgccagggagctcccaatttggaaaggcaacagggtccaagcccttaggagcttctactccaaggctggagaatctattctgtgtccttgaatttgcagtttctctggggcaaagaaagatccaagtaaacagaggaaaccttgtcaaagtgtgattccagaagggacaactgagcagcatgatttaaaaagcatgtgccttcaagttagagccagatttggtcctgtctgagacactgtgtggcattggacacatttcctagctgttcaaacccttggtcttcttatctgtaacaggggttacacagctgctcttacaagatgttcggagcatgaaaaaagatcgtgtgaaacacctaccaacatgcctggcaacacagtaggggctcataagtatgagttccctttccagcctcacacctgcagaagctacagcttctagaactttgtgcttcttgcctcattggttttcacctccaggccctgttttgtccctaccagtatcaggcctaacaggggcagagtgatatctaattcttacatagcttttcatcatgattgagaagactacattaggctgcctcgtaagtctgtggtcccagccttggatttcacagtgttttcttttagcagcagtctgtcatgcagaaactgggcctgcagtgagtgcaatcacttataagacacaagcaaggatctgagcctcctggcaggtagcaggcagggaggtagctttcaggttgggaattggtgcctgagcacaccacagagcagcaacatgagagggtggctggcgacatgtggggaaaagccaaactgacttcttttttgaaaaaaagagacgagtgtgcttcaaagacagaggcagtcaatggatcaaagcaaagcaagggacattttcaggactgaactaggagaaacttggagccaccaaactgtaagagacagtagggagttgtctccgggcagcaagctccctgtctatttcctgtggagtctcagacctgggagggctggatgaggaagcaaaggctctggtatcacccaacaggggccacctctctgccttttctctgctgagtggtgatggtggcatctcgcctccccagggctgcgtgcccagctgctgggtggttcaatgcagcatggcatgggtgctgcaggttccggggagcctccttgtctgttattccttgcaaattctaacctgtgtgggcctggagtctgaagccaattaatttaaggaagaggcagcaggatgttagtgttaaaacaccgcctgcttcagccaaaccataaacatttgtctcccgggttggttttccctcctcttctgaagcgctttagagactcagggtaaggtgttgttgaagcatccgttcacggtggagagggatcaggaacaccatcctgcgtttgagactcgaagcctggtctggtgaagcctggcagatagttcacacaagcaggacaagccccgtgccaatgccaggcaggagtgatatccagtcaccgcacagggccccagtgactgcctcatggcctttcccttcccggggccctccgcacttgcctcctggaaacctgcaaacaagcccagtccctcagggcccttgggggttgagagaaatgagaactgacctcggctccagaaagttctttccttggcctcatgacaaaagcctggtttctctggccacaaggccacagcccattcaaggctgctccatccccagaatttacaccatgagcagacagcagtcaactgctaaccaccatcctccctcacccaccttcccaacccgccagtccagaacccacccagcctggccttggggcttgagatacacttacagactcagatcagggctgataataaaaacacaccaggagggccaggcacagtggctcaggcctgtaatcccagcactttgggaggctgaggcgggtggatcacctgaggtcaggagttcgagaccaacctggccaacatggtgaaaccctgtctctactaaaaatacaaaaattagccagatttgatgccgcacacctgtaatcccaggtactcagaaggctgaggcaggaaaaccacttgaacccaggaggcagaggttgcagtgagtcgagattacaccactgcactgttgagattatatctcaacagcaaatgcatggtcctagccacaaagcctttctcaggtcggttctgggtgtttggaactttttccttacaccaatccgaatggtagtgtgcttccccagctttaccactgacatgttatatgagagttttagaactggctaatagtgatattatctcctgagggttttgggggagtgtgacttgaccagaagccaagatctttctacaaaataattcacaagtgttaagtgctaatgtccatcagttccctacttgagacaggccaacattaaccagtagacattatcagcaccaacctcagtggtctgaatcaggttaagttttgagaacaagcagaaactacaacttatcataagactggcgccattgtcactgacatttggaatgtctgtgtgatgctggctgccctgtcagcccagtgcatgcacagacaactcaccatgtgtcccgtgcagtgtgtaagaggagccaggggactccagatacatcaagactagcatgatgttgacaccaggctgcgtttgtacctctcagtaatatatctgtttgtatatgcagacagtgaaaaagaaatcccatcacattgctctcttaatcctcccccagttttaaagtattttcccccttcccttctgaaatagcctgaatttcagcagagctttaaaaactacattgtgtataaaattgattgtccctgcatctgggtccctgaactgatttgattttaacttagcatgtcatacaattttcccaggttggacatcattgccgatcttctctaccagtctctcctacctccaggctaagctctagaaggaaagcttgagccaaggattgctgggacatagctggccgggcagactcctgaagtataatcctaccttgctctgctcaagacatgccaattcataaccgagtattctccttccattatcagaaatagattttgtcttttcatgctgacctttcccatttgaccatctgcaattatttacagtgggcactgctttcagaggacacatgaaggaaactgcagaatggggtccccaattctgttccccaggaaggcctttggctgcccagttgctgaaattcagagccctccagtaaagagtggctggctgttcagagggactgatgcaggccctcactgttgacagccaactggcattgtggacccagtgtccactgaggaatggcagaaagttgctcttactctttggagaatatgccctctgactaggaacatagagttccctgagagccctgagagttccccaactgcctggaggagtttcttgctaataggggagacagagtcctacgactatggagttttaaatcaaggcagatataagcatgatatagacaagatgaaggtagaggtgtgtgttggagagtgtgataactttatttagtttctttaaatttctctgaaacaaaaactcctaaaattcagtgtgatggattaacacagcctctgccctcatagattatcacacaggctatgacctctcctgctctcagtcctccgtcctttcgggactaggggttgggaatggaggccgtgacaccagtcagcccaaatcccttctgaattggacttggcaaaggtgggccctccattgcatttgcctccccgagccacacgcacaggctgggcagggaagagtctctctcccggaaatgtaccaggggccactgcggtcttctgcctgaaatgaaacctggcagcagcagataattcacaaagcagatgactgaaattgtcttgagggctggccctggcctttgcggaaatgtgagacccaccacaccaggagctgggtctagggctggaacttggtgggcccctggcttgttccaagtatgtgaactgagctcatctggaaaagattttgtaaacatttgctttctctgaatcggtaataattcaattttcaggccttagagccagaggtgcccccctcattgacctggctctagctttttgcctcaggtccagtgacatcacttagggacaacacagaaattattggactagacttccataccttttctagacccacagtgaggctgttctgactaccaccacttccctaccctccatgcctaattccactctcagcccagccccttgtcactgcagttgggcagagccacatgctggccagacagcaggcatctctcccgtcttgctttagaaccctaagggaaaggtgcccagtagctttgggtccaacccttacaggtgagagtctaagcctgcagcatctgtctctgttaagatctccaggataagattcttgggctttcctaggtcagccatcagagtattttattgatgggcaggaagtttctccttttatccaatgtgaaataccaccaactttcattcaagtgcatctcctcttgccgtcctcggtgagatcggtgtccttgcttttctggtccccattcccaggagtcctttcttcaggcccaagatgattaaatgcaccaaatggataaattgggttttttgtcaatcacctcctgattcatatggcaagtgaattgcattttcctatgtcagattttcctaaatctgcatgtggtacctgccttattggcctctgcatacataactatttcagaaatagggtgtatttgttttaaacttgacaagttacagagctctgtctctttttcattcttgaagcagtcccatgagtcagattgaataaggaaagcatcactcacttgctacagatgaggacttgggcttgtgagtggcttcttagcccaaggcacctgactgtaagagcagagctggggtcacagtcaggtcttctgcctctgagtccagtactccctttccttacatcattgctgcctctctgtgggtgccaccttgactgggaaagcccagaggatattggagagtgaggatgaggggcaaagaggaacctgccatggatgctgctgatgaaatgaacctgatcaccgcaatgagcccccaaactgccatcctagagcagggcttgtcccaagccacttaatgctcatagctcctgctgcaaaaatgccaagacgtttgcaagacgttgtcctcttctgggacaggagtcataatatccaatttataaacctcagcactgtttatttattcaacaaagtgtgctccctgtccccgccccctcacacgcacaccctagctgagcagtagacaaggtgcccttgcccactaagagccatgtcccatcctctcttcccaagctgatcctggtatatgggaccaattctggccccccaaaataagtctccgtgcctggggaaaggcaccgttcgcttagaaggatcactgagaattgactggagaatgacttccacagaaagcaccctcaggtgagagatttggcttcatgccttcccccaccccccaaccccactccccacctctcctcttagagggagacgggttctcaaatgaccccctttcctgcgtagccagccagtgttcagtttgtggagttacgctgagtttgcaaaagaagaaaattgctttgtccctaatgccttcccactgtcagacagcaggaacagctactgacaagtttatgtgccgagtggcagtccccattctctcctaagcagccagagccgttgctttttatgagtcttctcaaagatgcatgggtttccagatggctcgttcggggactttaacatgctttctggagcctggttcttctgctcacagagacagacagagagaagtgtcgactgtggaaaatagaggctcctctcttccatgcgcccagccctcaggggtgcgggttccactgcccagaagcctagctagaggcgggaccagccagaactgggtgcttattgcctgctggctgcgccctctagtggggacccagcagccctgtctttcacccctggctgggggacatctgcaaggtgactttgagctgaggctccggcaccgtgatgagcaagtgcgtaataaaacgggacttgggatttgaaagctgcattctaatacagtgtcttctccacggtgattttagtgtcatttgatggaggaggactgagcaaggaggggtaatatagacctaagatgagctgcttattgtgaaattcccttcaggccgactcagaaaccacaggcctccccacacacaggaatgggagcggttgccaaggatgggcataataccaacagcccttttgtcttctatctaagcctgcagaagggggtatttctgaacagcacccttctgtgggcatgctacatcctgtctccgaggctgcttctgctggctagattagtctctaggtggctctcctgctggaagaaacggaaacctaaacctgcctctccccacccattagttaggtgggcctgcccaacaccttcctgggttcacatccggccagacaagaaagaagccaaaaaactttccgtctaccactgcgcctcctcatgcccaccccatcctattagcctaaaatggaacgggctaattagtttatttgtatagggaggggtttcagctgcctggacaaaaccaggagtccactgtccaagcttcttctgttttcctgagctcagaagaaaaaaagtgtgttagactaagataataccgccttttgaatatctcggcttcatatttgcctccatgagtgagagggccaagtgttatctgcaagttgaatcttctatattcaaaaatctccatcccttttttctgccagcgcattcccagatcagccgttcacttgctctaagcctctataatttatttttttcttttctctttaacctgctctttccattggccagtttattcatttctcagctacagcttcagaggggctcaccttcgggcttcccgccccaagggcatctggaggcttcagttctgttttctctgctgagtcaggagccaggcccagcttgatttggtctcccgtgtatctttgtgtctctgtctcagtctcctgctagtgtgccttgggtgcctcatcaatctcttcccatccctgtgacaagtgggtgaaaatcaatccacttctggctcttccaggcccaccagaactgagggcctcaaatcacaggcccctgggaaagggaggggccaaagccaggagtgaccccacctgcatcgatgttctttgcctctgccattgaaggcaactggtcatagggcagagggggagaagccaagggaggcagaagggagaagtgattgttgcaaggagcagccctctggagccaaagatgtgaaagtgtgactctcagaatgtctggttctttaagacgggttagccgtagcccaaaggtagccagcccagactcaccttgaggcttaaaaatcagtaagaacttcctttaacaattaaaaaaatattgttttccattttggaaaagaaaataaagtttaaactactaaggagaaataaaggtgagacaaaattaacctggttaactggttgacaggctgcggccctcattagggtcagaatgatgggattgggggggccgaggcagtgtcaccttccgctgccccccgatctgcaaccccaccactctctggatttgtgcgtgtcaagtccactctctctgtagcaaaggtacatcctgagcctgctgttctcactctggagttgacattgcaggataaccaagagaaagcaggtgttttggtcagctatggtttagctatgaattggttcagtcggtatgttctgcattcatacttctttgtcttttttttttttaaacaaaaggaaaaaaagtttaaatcccccctttccttctcctgcaggaggtgagtgtgtgggtgtcctgtagaaccattggcttccaccccagctctggccccagcctccaggtttaccattcccccccatccctccctccatccccttctctccaccccaaaaggaaactctctgccgccatcattactgttatgtcaagatgcccaaactctccataacatatcccatcctccgaccacgttcagtattgatgactttcattcagtgttatgaatgggaagggcgggaagggagggagtagccagtggggaggggcgggtggtgggggtgggatggagaatggagatcttttttgtcttttttaaaaaaaaaaacaaaacaaatttgtcatttaatggatccaaaaaccaaaaagaaaaagtgaaacacacacacaaaaaaagatcaaaaatcccctctgcaaagattttttttttcctggacacaaattgctttgtttcctgtcacgttttaatatcaatattaacacaatgtgtagtctaaaactagttcctttgtagtttgcatgggatgtgaatgctgtctcaacgtgcccagatctagaagactgcatgagcatcaattcagatgtgaaaaaaaaactctctctctctctctctctcttccatatatatctctatttctattgtgataatttggtgggcagtgaagcacctccggttggttgccgtagtgtgttgaatgattgtttttttattctctatatttttggagctccaagcttcttagtagtagcctgggctgagtattcttgagtccctgctgatgttttcgcatggccttggttgagtgttagaagttgggcctcagctgtttttctcaagtgtttggcttgtaatgaccggtgcatgcctggcttctggcctcatacccagctctattctctgcacaccagtcctgaatagctacagtgctcaaccgaattttggcgcgcccgcttccccggcaggctccaacccggcgcggcccggaggcttcccgggggccaacagcccaggacctgtcgccgatctctacggccctgccagccaggactccggagtggggaattacataagtgcggccagcccacagccgggctcgggcttcggccacggcatagctgtaagtacctgccttcccctgccctcctgcctcctccttcctgaccagctccttgtggcctgtgggtgtgccaggaaagcccaacatcgggggcagaggagaggacagagggtccccatcaacatcacaccagctcctgagggctgaagcctccgtcgtcttagaggtgtcctgggtgcctctcgtgtggctgtgtgatggagcagaaggagcatgggcaggtccggttcagatcaccactccatcaccttcacacagtgcatccttgagccacttcgataacccgtctgaatctcatttccctggctgcaaaaccagaatctctatgctttcctcaaaagattgtgggaggattattcgaaacagtgtcccacgctggcacgtaatagggcctcagtagtggccaccttccttgatccccgctttctggacactgtcatgtgggctgggacctgagagctgggaaatgtcccagctccccaccagagtagcagccttagtcaatagagcccctgatctaaggtccagtggcagcgctggagcccgggaggtggtgtggggatccaagccctctcccaggcagtttcctttgctaatgtttcttacagtttccaggttccaagtaagttcccatttgcgttccttagctgcagcctccaccccttgaaggccagatgcatttgatatttgtaatgctctgtggttctataatctgactaatccaggcaatggaaatttgcttaacagatttgcatgctgttttcagattgtgttgttcttctccctcccggtgtgtgtgagcatgaatgtgcctgagcccacttgctcgctgtcccttccattttggaaacagaaaattggccaacctttgccctagccagcctcagcattttggaggcagtttggttttgagctaagatgggtgcgtctgcagtcccaggccacgttcctgtcagactccgcttctgagtgacagctggcaagccctgacttgggggccacgctgcggagaacaaaacatgtgcagacagtctagggcaccaaggtggcctcattcatgccccctggcattgggagctcctccctcatacacacactcacacgcacgcatgcatgcacacacgcacacagacatgcacgcacacgcacgcacacacgcacacacaggcgcacacacgcctgccagccctacttgtgcaggatgggtccttgttcagctccgctcccaagccagtatcacttaagtcagtagtctgatgaatctaatcccttcggatcaactgtggtaccaaatccagaataatattattcacctgagagctgctcaatttaggggaccgtctatcaccacttataacacaacttatttccatattcagcatccagaaacacagacccaatttgttcttgaaaaccggggtcttttgacctgtgggctgtgatgtttttctgaaataaccagaaagcatcccagtttgtctgcactgggatttcttctccccagctagagccgttgggactgcggacagagacttatctttgcactctggggttcagggcaacatgcccatcactgggggcacaaacccccgtttcccaccatccacccacgcctctgaatctggcttttggtttcccccggggtaagcagataggcttggtaggggcggagggagtggggactagggatttggagctgaggaggatgtcatcctggcccctcatggcacggtgtctcagaattacatattcatgctggcaaccacagaactagtcctagagataatttcctttcccagaatatgacaatctgttcccatgtatagcacactgatgaccttaacaattgtgcaattttagggacctttgattgcaacggcctttacaaatggataccattgagcaggtgctttcgttgccatctcactctgaggtattaccgtctctgccatgtgtctctgccctgccggtgtgtccgtacatgtatgtccacaggtcatacatgcacgtgcgtgcccctgtctcatcacatccacatctctctctcctctttctggaccccttttcaggagggtgggggcaaaagcaaatccagtcgtttaatctctcatctcttcctccagcttttaatcatgacccccacctttttgactctctctctttttttcttgatttggttctttggattctttttctgtatcttccccacccttcatctttctctgtcttgaaatacaatcaagagtgtgggaaactggaaggagatctcgtgctgtgcccgtcccagggggatagaggcagggaagcattgggcttctgctaggcctggaagcagggatgggggccagggccacccactcctggaggtcctttgagctggccctgtgggttgctgggccccttcagctccccaggccttgctggggctcagccaatggggttcatgcagtcaaacagccagactccatcttttagtgaaaagaaaacgtttttgccagtaactactgagtaattatccagattactgcacgaaaagcaaattaaattaacgacatcacctgtgtaacatggatttggatccctgccagtttcctaaccttttaaactgagctcaagttaattaaacattttttcaatcactttgatggggatatgggggaggacggaagagaggagagggaggttggggcagtgaggaagccccttgccacacactcctttggaaatgagtatctgtccttcttgggaagaacaccagcaagggagaggggttgtccttgtgaaagcgctagatgtgtactgtgttagcacgttaagtttgtgaggttggaacatggatctgtctctggaaaagagagggtgacagctgaggccagggaatggattccactcggaaaatcccacagaggcaccaaagcctttcaatcttggagttgggatgtaggagaagcaaggctggagatgaactggccactttgggcttgcacttcattggatgcctctctcgtagagagggattgctcctggctcctgagtcggaccaggtggagaactgggttgagttgagctccataaatctcttggatttctctaatgttgctgctaagggatcacctcaactaacgcaactgcctctcttaaccaaataaaccatgtgtgtgaattctcccacccctcgcctccacttccccttgagcactgacccagccattgctggccagagccagaggccactaacagtttgaaggaaagctacttgctactaattaagctgggtttggggacccagaggaagtaaggtttctctgagaacagggacaactggtatcaccaagaactctggagactgaagatggctccagccctttgtggagtcagatgaagagggggttaaacaactaccaggcacagcagacccttgaaaggccagacactggggctgcctgtgctccctccctccctcccctggaagagaaggagtggtgcagggcttcctgcccacagctccatataaccccaaggccactaaagcctttccataggggtggggtggggtggaatgggatgggggaggctgctaccagcccatcctccctcatctaagtctaggactcaatttccagagaaggatgaagtaaccaagagtgtggtagcaactcacccccttccaaaatggattaggtgagctcatagagtcagatggctgcacccgcagcacttaggaaggactggtcaaacacacccattgtccccaaccctctgacattcagcgccatccacaaaagaggagcccaggccccctactcccagtcaattcagggagactcagtaaacacatctgtgaatcctgggcctgtttttgtttcctgtaaccaaagccggttatttgttgtatatttttagtgtcatgacctttagtttttggtatatgatatgatcttttagtgtaagtttgcatttaaaagttatcgatgggtatctaataaaggcaagtttgtggggttttttttgtttgtttgtttgtttttttaacatttagctttgaaaacagaagtttaaacagaaaaaaggtatctcaggtcaatgggcagtttgcccacctggctgcaatccctgtaagcacatttcccaccactacctcaacaaccctatggtactatatcaaatcagcaaaagaattgaagccttgtcctctccccagtgtcaggtatggtttagatgtcagatttcccaacctgtgatctcagtaagcttctagccaggtgattctcgtgcgtattcaatagtccagtgaagtccatctttgaaactctagttaaaacagtggaggaaatcgcatacttgtctgacacttctttctcctcccctctcccctccattttatgttttcttctggacatcctggccttccctgccctgcagagcatacctggatgtccaggcaagactgggcgaagtttctgagtggccctttgtttaggtgatgtcctcagacctggacccccaccagcctcactccccatcccaaccagagatggctcacttcggatcgagggttgactacatctcatcatctcacgaatctgctgtaatataagacaacagcttttaaatgtgtatataacccatgatttcggttttgttttgttttgtttttcttgatggtttccctctccctccctctcttcccattctccttttaaatctctttgaatcacatttggtagtgattttgacttagtccagtagtcacatagctttaatatctagttcaaagctaaccatagtataattgttatattaaggagttattttttcttaaaacatttttttttgcttgttttggttctgttctcacttttaaaggatgctgagatggtaatatgactctccatattttggtaccaattctgagactgtatgaattttcaggtggaactttagcacacactgaagcaaagttgtgaagtgcagggcgggaggtgggcgtgagctttctattttgcgttgtagaagaagtgagatgtagtaagctaattaacagactttctagcagttctttttgtgatgtctctttgttaatctgagtctatctattttcggcaataaggtaaggacgacagtgttttgagtgtcctccttttctataagtgctttttttctgttgaaagaggtgatattataaggttttttgaaattgtgaattctaaaaaagaaatgttgtaaatacaattccattaactacatagaaactattaagaaagagagaatcaaaaatatttttgtgagggagtcggtcccaggcagtttgatgctctgtggaaggaggcgggaagggaacgttggccaagtcagttactgagatgaagatcgcccagctgccaggaccaccccaggacaagttagagcactgtttagctcctttgtctgtgtgatagacctaagaactgtattagtgttgtaccagcctattaacctcttgtctgtgcacagcttcaaatgttaccgtctagttagatttttatttaaaatatgaaaaactgcttttcccaagatgttttttaaaaacaaagctacaattttaatatttaacatatttaaagtttcaaagcacacctgtttggcttgggtgggggtggggtgggggggacattctttttcagtcttaatttttaaatatttgatcattttctattgtccaatcatttcagcacctccaaaggtccctaggacactttgcctctcttctccccctgccccccaccctgctcccacatctgggggcccatgggccaggagtggataagcctgcattaatacaacctttctccattcactttctatttacaaattaggaaagcaaccttttggtttatatatattttttttaatacctcagtgctgcaagtatcaccagagaggctatggaagaatttttttttaatttattgtagatgtaaacagaattttaaaaataaaaagtataaacatcactgcactgtgactggtgggaaaaactgacagtttcctctttgcacatgtttaacatttggctgttataatatatggtcctcggttggggaaagatacttatgatgaaggatattttttaatttaacttttttttaaatattggtaataggtcggcaacagcaactatagaagtacaactcaatagatggcattaaaacatattgtagtgtggatatatattttttcttttttaaaatgtgatattgacgttttattaatattttttaaattgttacgtttataaatttggtacttaaggcacagccagtatgagacactgaatgcgacatttattataaagagctgctgcactcctatttttataaattttactaacaaagtagactaatgtagacattcacagacatggtagggcaaaagcatcttcaaactaaagactccaaaatgctaactcagaaagaaagaaaaaacccgttttcaattctaatgaaacagcaacaacattttttttaattaaaaaaaaaatcatgttctttgtttttctaataaaatgttaggttgtttggtgaggtttttttgttgtttttttcctttctttgtttcttttcttttcccccaaacaaccagattaaatgctgagcgcttttaaaatatcaaaacttgttcaagtcataaaacaacaaaacataagttttatttaaaaaaaaaaaaagaaagaaaaaatagtaaattcccagaaattcagtgtttagacgagggaatttaattcctattttgtccatgttggtgatgtactgtacttcccttccttttctctgcatcccccatcacctcatagaagactctttgttgatcattgtatgttaataatgtataaaatggctatcttgtaagcgtgctgtcctggtactagtgtagcgactttttttctcctctttcttctagtacatattgataggtataacataattaaggtttaaaaaaaattagacatagttattcagatttaggaccagtaaggatagaactttctcttatttatgaaaaaaaatgctaataattttggggcagttttttcctttaattatttttttcaatttcaagtttaattttattttagctgatctgatgtggtttcaactaacccaaggtctcaccatgttaaaatgccggcggactctacggcgttttgtagatccccccccccccacccactgtgaaggggtgccatactaccttaaatgctaatgctagatatgcaaaactggatttttttaatttattttttaaaagagggaggcatggtatattaaaatgattttactaagagaaaaaatatttttttaagaatgctcagaagaaattgataatctgtgtgaatatgttttagatgtttatataccttttgaagagacccagtagcccatagcacaaatcttgtggaaatccgatatgttttaatgtggctacctaggtttaaggttcacgttagtccccccattccatctagaagtccattttgaaagatttttgtaaattcttttaacactgatgtttcagcctcgtctttgtttcagttaagctcaatggcgaacatgggaaccacctttcgccttccctgggggagaaaccctcttggctgatggcttttccccggaattatcaaacagccaccgggtgactttctggcttccagatccatctgcctgagacccccgaactcctctcctcccaagcagaggcgagtgagtggcattagctcccggacccattcccggtcctagctgggcatggggctgacggagatgaccaagccttggtctgctctctagcagcttccacagacttggctcgtggccttccttatatccactgggaacaaacagcctcgcgctctataccaaacagcctcgcgctctatcccagtcgcccattagcttgattcaaacaaagccccagcaggcctttgcgtttttatccttcataaccttcatcttaatttgaacttgtagcttggactttaaggtagcatggctctattgctgtcaatttactgtttcactgcacagcaatcacagccagtgaatgttacacacatcttgctagactagtataaaaatcattgggtaattgttggttctaatgacctgaaaggtgttcagtttttgttcttggttttgttttgtttttgatttcttgggggtgggttttgcttgttgttccttttcatttgggggtttttggggaaaaaatttatttttggttccaaatagaaaaacaaaacctattttgatctttagtgcaaacgagggctagggacttagcctcctccaccacctccacactgcttcattctgccattcactcactgcagcatattcaagaataaagcaatatcgtttactacattttttattgaaggtcagccatgctttctgtattatattgcatatgaaattgtttacaaaagaaacactaactcatacttctctttattggttgcaagtggcacgcaggaacagagggagagtggggggctggtgggggaggggagatttttttttttttttcttgaatgtgcttcgcaagccaggctatcttccaaggaaggcagacagtgggagagcagagggactgactgcaggcaagcacattgaagaaagacactggcgggtttccccaccctcaccccaaagcagaaaactagcagacgtcagctcagccccgtcctgggcacagacactacacaaggagacgctggaagttaagcaatactttaatactgtaatatgtttgttttctttttctttcttttttttctaccaaaaaaaagtaagtaaactaaaacacaaaaacatataaataaaatccatccctcttgtcggggacctgcaggggggcaaccttaatccaaacacctggctatcaaataatcagaatgtattgtctcagacaggatttcagttccgggaggcaggggcatgatgggggagggggccggaggctgagagacaaaagttccagagcctccctcgaaggttctctactactgtattctgtacataatgtaccatcccatgtggaatctgtgagtgtcctcttaagtagcgtgggctagccaatctgccgttcatggtgtattgtaaactccgaattccatatgtaataggatgcaagtctaagcgtttcatgtggacataaatgtatctaaataaaactttccctagcactgtggctgacctcacccttacttttatactttagtatgaaactgatgagaactttggtagtgagtattttttttatatatatacatatatatgtactatctatatatatatctcaagcatctttcaggtctttgtgtgtggctttcttaaagccctgttgtaaaaaattactatgtggatggcagtctctcacatcacagatgtggaaagtataattttatatttgtattttcaaataaataagtttgtgaaaggtttccatcctctactgtggtccagaaatcaatgtgtttgtctgacaaaaaaaaaaataaaataaaataaactgttttgaacagagttgtttggtgttctttcacttgcagaggaggtctggggtctgggagagctgttgttttgcttgggcgggagaggatatcatcaaatcgcacctgccaccctcacccctcagcatgaatgctggccgtgggcctccagcagcgaagaagtccctgccttgtccccagggagcttgtggcaccatttttatgaagtggcaagagagcactaagatggaagagcagacgggagaggggtgtagattaacagcagaaggtacacagaacccatgagtggacagggaataaaccccaaaggtcctgcggatcagaggacccagatggtggaaggagctaaggggccctcccgggtgctgccctcagttatcaacagtgctgggagaaggcgccaaaccgcattccacgacccctgagtaggggtctgaataggtatcagacctctgccctcaaggagttttaagttttgcctactggaaatcattacaatcacaaaactaaagatgtagagatagatcatctacaatactttccacccctctctctaccaaacaaacgagaggatacaaaagaattgagacccagtacattgagggcaagtcccaatacctggtgatgacggctacagcatgctctgaatcagtggattcctcagctttgaagccctggagagaaacaccaggccaagaggagtgcaagggatgaagcgtggatgaaggacagtggcccttagctgcttcctcaaggcccccaggaaagctgtattctccaggacatggccttcttgggtccctcctccaatttcctgtctcctgcatataacaagtttatcttttttgtaaaatgggtcttccggtgaaaaccagaaaaccagctagacaggttctttcaaaaagctgcaacactaacaactttgttttaaggcattcccgctacactggggtcctagaggagacagtcgaaggtgcattcctttatctggagctggaggcaggagcactgggttccaggcccacctcctgtgtgtccacagacagcactccacagtgtctcgttacattgtttaggggcaggagagaagagtataatccctgctgccccacagaaatgaaagaccaatggaagctgatgtgagaaatcccttttaggaatcctgagagaagtgagccagacacatgaggccggccatcgtggccatgctcctcatcctgattgctcagctcagagaaaggggaggcccaaacccagcccaggagcctaaggagagagggagcagggaacaggagcaccaactatatgccaagtggatcatacacatgccctgcttagtcccacctgtgccacgtgactatctacattgtaatggtcaaataaggtggataatttgcccatggttgtatagctgctgagtggcagaatgaaaccccatctcccatacatcctgctgcccctgggttcaagcctggtgacaaatgtcagcgtcagtgttgagtgtgcctgggagggtgggagtgaggcttctaacctaggtgcctacctgagtcaacaaaatgcactaaaaaaagaggtaggacagtaccaagctagagaacaacaaattttcctgttttaatgtttcatggagaaaaaataaaaaaataaaatagaaaacaaatcagcaaaaactagaaggaaaaagaagaaacaacaatgtaaaataaataacacacaaagtaggatagaaggagtgagatcaattgaatctaccattatctaaatatgaatgggttgaattttctatcattacaaaatagatgtgtttagaaaaaacaaaacccggttacgtgctgtgtatacaaacacacttaaagtgatgaaaatggctaacaataaagggccgacaaagagaaaataggcaaatacaaagaacaagggcaagaactgaaatgtcagtatcagacagagtggaatttaaggttaaaaacactccacagcaatattatgtcatgacaaaagacacaatctattaagaagatacagtggcagtaaactcttatgtcccaattatcagaggaactgaagactttaaatcaaaagccactagaaatgcagagaacttgataaaaaataaaaatacagttagagagattaatatacctctcttagaactagatgtatttaatagacaaaaataaagacatagaagaattgaataatgcaattagtaaacctgatctgatggctctatataacctgatctgatggctcttcgaatagagtttgcacatttttttggtttatattcatggaacataaaaatcaaataaattttggccagcagccccccccccaaaaaattttagaaacaaataattaacatgtggctataaatattataactgtgtacaaattaagaaacattctgttggatcagagagaaaagttaaaaaagattacatacaaactgccaaaaagcaacagaaaacacacattatacccaaacttaatagcatatagccaaagctgtactcaaaatgtaagctttaaatgccttcagatggaattttttttgggggaggtgaaggaatatattactttttctccttaataaggtagcaaatagcaaccaaaaaaactagaaaaaaagaaattgataaatagaagctgaaagcaatagaatagaaaacataagtccaaaggctgtatttttataaacagtaataaaatggacaagtgcccctgaataaaggggaaatgagcaaaaatatacaatatgaagaatatgaaaggagttaacagagaaaagaatgaatattggcaacaaaccaaaaaattcaggggaatcagaaaatttcttagcaaatataaattaccaaaactagtaagaagtggaaaaccaggataaacttaatatcacaaaagatactgaaatgataaataaagatataatactgaaaaatagactggatccaaatgagttttatctaactaataattccagcaccatttaaactattccagatgatagagaaatatggaaagaaagctctcctgttttatgaaacacatggctttgctgtcaaaacccaatacagtaataaaacaaaaaatatatctacagacttaggagctcagatgtaaaaatttgaaatatgattttagctagtagaattctacaatatatcaagagtgtaatttaatatggccaagcaggacttctttcaagaattcaaggacatttcaacatcaggaaatctgtcaacatctattatactagcaaactaaaggaggaaaaccatatgaccataacaatatgtgctgataaagtatttgaaaaatatggcagctctttctaataacaccatggaatgttgaaacagaaaacactttaccaaaagactattaatatttgccaaaccaacattaattattctaaattgtgaaacacaaaacctgtttcaattaaaataaggaacttgtaggggtgctgctgtcactattattaccttaaaccttctaaaaactaagataacagaagacataaacattgggaggaaaagacaaagatgattttatttctagaaattttaaaagactgcagtaaaataaaatgaatacagaaaaattgctactaaaattcatgaaaactttggcaagatggctggatgtaagataaatatacaaaaaccactaggcctcctcctctccagtagtaagcactcagtaatggaaataggaaaaaatatttaaggataaactttataagagaggtatatgcattataataatggttgaattccccatcactagggaaattatggactgaagtatcaatatacagcatatcatagaaaattaggcagccattaaaacaggtaaccccagaatctaacaagtggcttgaagaaatttatgaaacacagttgaataaggtaaaatatctttgaaaaatacatatatatgtatgtgtgtgtataaatgtacacacacacaaattaaaactacatatgtatatatgtgaagatacatatgtgtatatacatcacatgtatgatgacatggatacaaagaaaggggtacactctaggttgtttacatgggctctgggatgtggggctgagaaataagacaagtgggagagggggataggaagaggtgacatgctgaaaaatatatgtttaaagatttcactgaaaattctgtaagatacaatttaaaaatttttttaagtgtgactctatgaaaatacaaattttcaaacaaaactatttttaaaagagctgggatccacattccagtaataataattacatctcgactggtgaaatggggaagacattaagtggtcaaagaggattctggcttttcctgtcctttttaatttttcaaaagaagtgtggatttgtatattcagctgagataaaattaactttaaaattagctgtctaaaaaagggaatacaagaacgtctgggaagagaaagtcaattgtatgcagtgatatgtgggttttctctttttttttaattgtactttaagttctagggtacatgtgcttattaatagtatgttctctctctctacattttaatagaaaatatgtatcactttttcatttaaaaactatttccattttttgaataataaaatatgaactgagttaatagaaaaagaaaagggtagggaatgattctgataggagcaaaaggtagctaggagcatgccaaaagagtcctgtggtcaggaagctgcagggacagtgatatccctctgggagaacgtggtttcatgtaagcgctaaatacaacagtttcaaggccacaatccttcctaccttccaaagacaataatgcattttaaaaatcagatacattgaggtatgaaattacatataatacagtgcatccattttaagtgcacaattccacgagttttgacaaatatatactatacacctgtttaactccctgcatagtcaaaatagagaacctttccatcacttcaaaaattctcttgagctccttactggcatccctggtcccagacaataactgacctactgttagtcactatagcttagttttgcctattctaaagtttcatataacttgaatcaaacaggatggattctttgtgtctggtttcttttgctcagcatgcgttttcagattcatcaatgttttgtgtatcaagtacttatttttattgctgagttggttttccattatatagatatacccaatttgttttcagtttttggcaattatatataaagccactataaacattcatggacaggtttttggtgaatataatttttcatttctcttgggtaaatagggcgaagacattgggtcatatggcaagcatatatttaactttagccaacctgttttccaaagtgactgcaatattttgcattaccactagacatttttcagagttctggttactttgtattcttgttagcacttcgtattgttcagttttttttttttttttttagtcattctaatgaatttgtagtagtatcttattgtgatttttatttgtatttctctaatgagtaatgatcttgagcatctttttgcatgttatcaacatctggatatcttctttgatgaagtacttgctcaaatctttcgcccaaatttaaaattgggtagggtgggcatggtggcttatgcctgtaatctcagcactttcagaggccaaggcaggagaatcacttgaggccaggagttcaagaccagcctgggaaatatagtgagaccctatctctacaaaaaaaaaaaaaatacaaaaattagctggtcattgcagtgtgcacctgtagtcccagctactctggaggctgaggtgggaggataacttgaacccaggaggctgaggctgccgtatgtcaagattgtacgactgtactccagcctaggtgacagtgcaagaccctgtctgtctctatttttttggttgggctgcttgtttacatattaagttttaagagtatatattctgaatacaagttctttatcaaatacgtgcttgcaaatatttttcccagtctttggctattctctttattctcttaatgtttttcaaatagcaaaagttcttaatttttatgaaatccaatttatcaatctttttaaatggattgttcttttagtgtcatatctaagaaatctttgtctaactcaaggcacaacaattttatcctatattctgttccacaagttttatagtttcgcattttgcatgcgacctaagtctgcacagacctaagtctgtggtccattttgagttaacatttatgtatggtgtgagatatggggtctggtttttcttttattccacatattgaaatccagttgttctagcaccatttgttgaaaagaatatcctttctctattaaattgagttttgttgtacctttgtcaaaaatcagttgactatttgtgtgggtctttctgaattctctattctgttctgtaccactaatcaatctctctctctttctctctctctctctctctctcatctatctatctatctatctatctatctatctatctatctatattgccataccacactatcttggttgtatctttatactaagtattgcgatcaggtagagtgaacccaccagctttggtctttttcaatgttgttttggctactctagttcatttgttttccatatacattttggaatgagcttgttgatttttacaagataatgtggctagggttttaattgtaattgtgctaaatctatggatcaattttaagataattgacattttagcaagatggagttttagaatctatacacaagggacatttttctgtttaactttatgtcatcaatgttttgtagttttcagcatatagaacttgaacataatttgttggacataattcatgtttttctgtgtgagtttaaagggtacttaacttaaaattttttaaattccaattgttcattgctcatgtatagaaatacagttgaactttgtattttgaccttcagccttgttaaactcccttattaattctggcagcttttttatagattcattgggactttctatgtagataatcatactgtctgaaaatagtttcatttctgtcttttgttaagctgtaggccttttatttatttttcttgccttattcactggctaggagctctagtacaatgttgaacaagaatgtcaacagcaaatatccctgactcattccctatcttaaaggtaagtggtcagtctttcatcattaagtatgatgttagctgtaagttttttgtcaatgccttttattgagttaaggagttccatcctattcctactttgctaagagcatgtgtggatgctgagagcatgtatgcagcataaatggatgtttaattttgtcaaatgttctttgcatatattgaaatggtcatattgtttttatactttaatctgctgatattgcgattatattaactaagttttaaatgttgaaccagccttgcattcccagtataagcccactgggtcatgatatattatcctttttacatattactagattctgtttgctaatatgttcttaaggatgtttgtgtctatgttaatttgtactgttattttctttcaatttctttggtatcagaatagtgatggccacataaaatgagttgggaaatagttcttctcttctattttttaaaaaagtttatatagaattagtattatttcttccttaggcccaatagtaattcatattagacaatcaattatgttttagagggaatgaaaataaggggaagaccctttcatatgtacctttattttaaccattttcagtcatctttatttctttgtgtaaatccaagttttctttgggtatcttatttttccacctgaagaacttcctttaatactttttgtaatgcaaatctgctggtaatgagtttttggtttttgtttgtctgaaaaaactatttgtttctctttcacttttggaagatacttttgctcagcataggattttgtgttgacaggttttgttttgttttgttttgtttcttttcagtactttaaagatgttactccattgtcttctggcttgcataattttgatgctaaatctactgttgtttttttcttaattttacctctctctctctttatcctatctttgcttttcaacagtgtgattacgatgggtctagatgaatgcatgggctttttttttttttctctttgttttgtctctttgtttaatttattctgcttgagattctttgaacttctttctgtggtttcatgtctttcattattttggagacattctcatccattatttcttcagatatttcctctgtcccattctctttctcttctcttcctgggatttcaattacagaatgtttgaccatttgatattcttccacacctcttgggtactctttttttaactctttttttctccttgtgtttaatttgttcaatttctattgtcctattttcttttttcttttctttttgagacagaatttcactctgtcgcccaggccagagtgcagtggcgcgatcttggctcactgcaaacttcacctcctgggttcaagcaatcatcccacctcagcctcccgagtagctgggattgcaagtgtgtgcaccacacctggcgaaattttgtatttttagtagagatgggatttcaccatgttggccaggctggtctcacactcctggcccacctgcctctgcctctgcctcccaaagtctgttgacctattttcaagttcactgattccttcttaaattgtatcaagtttacggatcagctagttaaaagtatttgtctctgtcacttttttctcctagcatttctgtttgactctttcttgtagtttccctctctctactaaaactctacatctattcatgtatgttgttcatcttttccactctagcctttaatatatagtaagcatagttactttaagtttcctatgtgatggcttcaacatctgggtcatatttgaatctggttttgttgactgctttgtttcttgacagtgagttattggtcttgtgtttggtgtctcatgacttttgattgaaagcaaaacatctttagaacagtaaaggctgtagtaaatatgcatgcctctttttctgctaggcaagggatctgcaaactatggtccttgggccaaatcaggcctgttgcctatttttgtatggcctatgagttaagaatggtttttatatttttaaatgtgtcaaatggatatcaaaagaagaatagtaattatacaacataagacaattatataaaactcaaatttcagtgtctataaataaagatttattggaacataaccatgttcattcatttacatattgtctatggctgctttcatgcttcaacagcagagttgaatagttgcaacagagcccacatggcccacaacacctaaaatatttgctatatactggtcctttgtagacaaagtttgccccttgatgtgggtggttgagtcaatctagtcagaagttgacttggatttgggttttgctgctctaggtttgggttttatcttcagtgcaccaccagctttaaattcctctagcattttcttattcttaagatggaggctgggttgccagagggtttttctcagtgtttctgcttcactcttagccttaggccttccttgtgtgcttgtgccttagccttgtccctgggtgttgtgatctgcccgtctcccagcagaaggagattcctcttagtctggtcccagatggtttccttccctcctcccgaaagctaaggcttttgttacatggaggacaaaacccagtgtaagctccatgtttttccaggctgtggggaatgggctaattaacagttttgccactttttggcaaaataccttttttttttagaaggctaagcacaaacaaaattaagacatacattgaaagtatgttcatgctaaacctatcacagatctgtacatcactctgtaggattaggcagattaaagtagctcatcagtacacaacatggccttagaatccctggcccctttttggtttaaccagacttaagttccatgaactccctggcttgataggttaactgcagtcccagacctctggttgcttaactcacccctggtcctaaccaatgtgtacatcctcaggttcagtgagtactatgccaatgcttaaaaataattaataactcatgcaatgattatgtgaatttgcactaaatgtaagtgctataattatgtcaaatcaaaagctgagcatagaacatagaaaatcttcggggagataaattgaaccctttggtttcattgaggaaaaatcatcaaatcacagcatgtcatagctgaaaaagcactttgagaacatctagtttacctgcttcacttaaccaatgagataaccaaggctcagagaaaagtaacatgagaaagttcacacagctagttaatagtgtgggaactattacctttcgaattaaaagtagggaggaggcagggagcctctgggtctttgtggaagggggcggaatattgggaggaagagtcccaggcctgcttctatttctaactagctgtgtggcctagctagtgagtatgactcagtctccctctctgccatctgtctgccctgcccctttcctggggattatattagctgagaggtgtaatggcacttcattaagaccttgggggagctgtgctacagggatcctgcggtcacccaggacttacttccctccattttctgaagatgaggctcagggcacagcccgatgcagtgagacaaagaagacaggtacagagtccagctcctcagcctggaggttcctgcccttgactagtataggcaccgtctcttctggatcagtcagggtctcatcaggaaaccagaagcagagctctctgtgaacagagataaattaacataaggactcgattaaaaacctctgagggcatcacaagggtgattctagggataccccctatattagtctgctgtggttgccataacaaaataccatatactgggtggcttaaacaacagacatttattttctcatagttctagaaactggaagtccaagatcagggcgctgactgttctggcttctggtgacggctctcttcctggcttgtagatgaccaccttttccactgtttcctcacacggcctctcctcactgtgcgtgtgtgtggtgagagagagagagctctctggtgtcccttcttataggaacactaatcctatcggatcatggtcccactcttatgacctcattaaccttagttacttccttggaggcttcacctccagatacagccacactgggggttagggtttcaaaataggaatttggggagacatgaatattcggttcctaacacccccccaaaaaagctggaaactggaacctattgtcactactaggtgaagacccactgctgaggcatgctgcctggagcagtaagtagacaggaagaaggatgtccttcctccctcctcccgccatgttgggagagcctggcatggatccagctggcaaagtggcaatgtcacggcagagtgtggaaggctgagtgtggagctgagaggaaccctctccagccaagacagaccatggaaccagagcaatcaaacatttattgagtacttattatgtaaaatagtaaaagtcacattcactccccaggattacctaaaatcttgaaagtcatattaaagtttttagaattagagctgggctcagtggttcatgctagcaatcccaatgttttgggaggccaaggcaggaggatctcttgaggagttccaggctgcctggggaacatagcaagacccctatctctacaaaaaaattaaaaattaatcaggcatgccagcaggtgcctgtaattccagctgcttgggaggctgaggcaagaggatcacttgagcccaggagttcaaggctgcagtgagctacaatggcaccactgcactgcagcctgggccacagagcaagaccttatctctaaaaaataaacaattttaaaaataaataaagaattaggcatttggtcagtgggcactggggtaatatggatttgagtaaaggggtgatgtgatcagctatcctttcttccttcacccagtcctacccatccttcttccccaaactcttggcacactctagactctcctcttttacattgcataccttctctgctcatttgctatacatcagcaacttaatacacagcatgatgagcttaggagaatattccatgggaccagagctatctctgtagcttcactgtaagccagggagggggtgtgaggtttagaccatggaaggtccttaggggatgtggtgagagtgagatgggaagtacctggtcagacccaccccatcaacagcctgtcttcatcctcgccagcaggacacacacacacacacacacaggctctctcctcacatatgcacagtcaagtcctctctcatttgcacactcccacactcacacccacactcccctgtgccctcacagtctcacacaccctctgagactcacacccctcacacactctacacactcacatggacccactcacactcactttactcacactcagccctctcactcacacccatggccactcccactcccacgttctcacagcttcacgcactcctgctcagtcttcgcccacactctctccccctcactcgcagacactcgctctctcacactcttgctctcacacttatcctgccattcccacattcccactgcttccctcacactcccacccccttgaagtcgccctacccatcattcagtcactcggtgtattagtccattttcatactgctgataaagacatacccaagactgggtaacttataaagaaaaagagttttaaatggactcacggtctcacgtagttggggaggcctcacaatcatggtagaaggtgaaaagtgcatcttacatggtggctgacaagggagaatgagagctaagcaaaaggggtttcccttataaaaacatcagatctcctgagacttattcactaccatgagaacagtacgggggaaaccgcccccatgattcaattatctgccactgggtccctccaacaacacgtgggaattatgagagctacaattcaatatgagatttgggtggggacacagccaaaccatatcactcgggcacctgcacccctccttcatgcccactttgaatcatacccatgccttcactccctccctcactgcctcccacactcacggctgtcacacttgctcacctccctgtctctggcttgctcactgttaccacacattgccacactctcccacagacaccctctcagcaggattctgccctcccaccttcctgtcactcttcccttcttcaaggctctcttcctcactcagcaaatcgacaggcactggaccagcctcttaggctgaggacagaccggatcttcctgtctccaccctctctctgagcaggaacagctctgcctgttcctggttggatgtgaacaaaggtcaatgtacagcagaaaagaaggctgacatgtcccatccgctgtcaaggaccctcctccctcccttgcccactttctgtgcccgcacgctgtggggcaccagagtgttccaacagggagcacctttcctcggtggctccctggcccatccctgcctcagctatgtgaggctgagcctccctgtcttcacttctgcctttcctcagctcccaggacacctccagtgtcatctgataacatgaccccagtagcaggcccgtttttcctttgatctctgtcttgctctgaatatccctacaaaagccttttgtgtgaagtgcagggtgcgccttccgtggctgcttgctgggccttccgctgtcttgggtttattgttatgggtctgggctgccctcttacatgctctcttgagtttatggccctctttccatctcctatcaatgccccttgttgccttttcatgtattcatttgaatgggtaatacagtcaagtcacgtgtttcaaaattcaaaagatacaaggagtaaagttcccttctctctccacccctcagcagcatagttcctctcctcagaggcaattgttctcttcagtttcttgtaaaagattctagaaatagatacaaggaagtgtgtgtgtgtgtgtgtgtgtgtgtgtgtgtgtgtgtgtgtgtgtgtgaaggtgagaaaggtcttaccaatgcacttctgattgggccactctcagatgactctaatgaggaagaggcgaggagagagagagagagagagagagagagagagtgtgtgtgtgtgtgtgtgtgtgtgtgtgtgaaggtgagaaaggtcttaccaatgcacttctgattgggccactctcagatgactctaatgaggaagaggcgaggagagagagagagagagagagagagagagagagagtgtgtgtgtgtgtgtgtgtgaaggtgagaaaggtcttaccaatgcacttctgattgggccactctcaaatgaccctaatgaggaagagccagggagagagagagagagagtgtgtaagctcagccatcactgggaccatgagggacactctccacgtcttcctcactagagtcatttgagagtggcccaatcagaattgcattggtaagacctttctcaccttctcatgccatcctccctttcagaatcttgtcatgtgaaggaataactatatattattttctgaatgtcttgcgctctgcctccctcaagtctgagagatacttccacgtgctaagccttcgttcagtgttataaagggtataatattataccctttccctcaagattcttatcacttccagttggctggtcagttctttgatggtcagaattgatttcagagtggctgatccactggtcattttctctaccccctgggagattaaattgttgggcaagtcaaaagcaatagtccaaatagacacttctgtgagagcatccctgtgtctgccgatgtcctttgccaaccctccaaaggtggatgggggccaaggagcaccccccacggaagaggggatggggcacatggccgcatcagccagcctggctgtcctgctgccctcgccacccctcccacaggtctctggttaattgccaggacacatcagtgggcactctctgaggaaggagcaggcgagccagcccatagcatcccagctcagcaatcatcgctgattaaaaactagttacaaagcaatgaagatgaaatcctgcattaaccaaatgaccccatccatggccaagcccagatagatgggagtgattatgaaagcatcactcactatgtcggcaaacgttaacggctgtttgaatttctgggagatttacggggtagtgacagcatttggctggatgggactctggctttttgcttcattcccagatgtgcctgtgtgtttatgggctcctgtggactcacagcctattcaaagtggtctagctcggctgtgcttttatgtgggtttaatctgaatatgccggcttgtgtaaagtagaaatgtattgtattgccaattttcagagaacctgaattagctcagctattctgaacataatttaatctttctttaatgattcaataggtgctttgaagtctcgcactaatcagagtcatggtcatgaatatcagaacttgatattgaagaagcataaaagtgctcatcaaagaattaggtgacggaaatggcaggaaacagcataagtggatgcttctgtgagagtgcaggtatgaccatgtgtgtcagtgggcatgtggaagcctggtgtgataggtctaactgggataacattgacctcaccacaagcaatgaatgaccctatcaaaaagtcagcctgggccgggcgcggttgctcatgcctgtaatcccagcactttgggaggccaaggcaggcagatcacctgaggtcaggagttcgagaccagcctggccaacatggtgaaaccccatctctactaaaaatacaaaaatagctgggcgtggtggcagctgcctgtaatcccagctactcaggaggctgaggcaggagaatcgcttgaactcgagaggcgggggttgcagtgagccgagatcataccactgtactccagactgggcaacaagagcaaaactctgtcttaaaaaaaaaaaaaaatttaataatgtcagcctgctcccacacttcccaaggagaatttggtctttgctaacttgggcctcagttgagcagatttggagtgaagggtgaagatgagaattgtcctccccggaaaaggcccaagagccccagacagagtttaatccccttgaataggtaaaagagaaatgaacagatatgtaaggtggtcagggggagaccagagctgggtttagaaggaagtagagtgttaggaggcagctgccatgattgtaaatatacaggtgtacgtgcacatgaagtgggaataatgacatctcccccattaggttgctatgagacctaagaagcccgcatgctttgctgtggactgaatgtttgcataccctcctgaattcatatgctgaagcctaaatccccaatttgatggtatacgaaggtggggcctttgggaggtaattaggtcatgaaagtggagccctcatgaataggaagaatgcccttataaaagaaattccaacaagctgccttgccccttttctgccatttgagaaaacagtgagaaattgctgcctgtgaaccaggaagcgggtgctcaccggacactgaagccactggcaccttgatcttgaatttcccagcctccagaactgtgagaaataaatgtctgttgtttaagccacccggtcttaatgtactctgttttagcagtctgaagagacaaagacatgcttgctctctccttctctctctctagctctctggtgagagaaaattttgatagaatcaccaattgaaattttttgaatcacttcgggaaatatttaaattgcctttcaagggccaggcgcggtggctcacctctataatcccagcagtttgggaggctgaggcgggtggatcacctgaggtcaggagttcaagaccagcctggacaatgtggtgaaaccctgtctctactaaaaacacaaaaaattagccaggcatggtggtgggcacctgtaatctcagctactcgggaggctgaggccaagaatcgctggaacccgggaagcagaggttgcagtgagccaagattgcaccactgtactccagcccaggcgacagcacaagactccatctcaaaaataaaaataaatacataaattacctttcagtaatatttgactgtagaaacctctttgaatacacccccatgtggaagcggggcaataagtaaggaacaaaagagctgtctgttagtgtggtaccattcaggccagaggctctctcctgggtatgccccagaagtggttcccagcagccgggtcaagcagatggcgctggccagcctggaaagtctgcctgagaaccacctgaggctagcacctccaccttcatcccctgccaacccagccaactagaggaaatggagatgctcaaacactcggacattagcaggaccacagggcagctcctccagccctgagacgtaaaaaatgagttacaggggcagctgcatagcccagcctacctgcactgcacatcccctttcccctccccaggagagagaaggctgggaaggaagttgtgcattggagctagggatagaaggcgggacaggggtagggttgtcccgagtcagccagtgcagagacctagggaaaggaccaaaggcggccagatgcggtggctcatgcctgtaatcctagcactttgggaggccgaggcgggaggatcacttgaggtcaggagttcaggaccagcctggccaacatggtgaaaccctgtctctactaaaaatacaaaaattagccaggcgtgatggcagtcacctgtaatcccagatacttgggaggctgaggcaggaggattgcttgaacctgggaggtggagattgcagtgagccgagatggtgccactccactccagtctgggcgacagagcaagactccatctcaaaaaataaaaataaagaaagggccaaaggctccattatcaaaggacccagtggtcctggctctgtggcattgcaggccaaagtgactatctctgtttgcccctgcccaaattctacccctaccccatccttgactgcccctcaccccatacttgtccagggcccatctgtctgaggatttgaggaatccagaggctcttccctgaatttaagtggtagttacactcttgaaaaagtcactatgtactgaaattatgcaaaagatactttaaaaaatatttttaatgtttattttagagacggggtctcacatgttgcccatgctgttctcaaactcttggcctcaagtgatcctccagcctcgacctcccaatgtgctgggattataggcatgagctaccatacccaaccacaaaaattactttgaattggctgtcaaataaaattaggcaaaaggcccagatgattatagattggtttcttctctacatggatatcgtgtgggacccttgaagggctctactgcagattgggggcctacccctgtgccctccctctgctgacctctcaagtgatacaatagccactaatgtcctccccagccccactcatccctccaccactgccagagtgggcattttgcactaccagcccaaccatgacattgcccctcaaactctttattagctccccatacccacagagaggttctcaacattggcatttggaagtttctgggggcatcttgatggtcacaatgatgggagacccctgccaccatttagggggcagggccagagatgaggatgcctaaaatgtgtgggccaatcccacatgaagacaacttgtcctaggtcccttgtacccttcaagggacccacacgatatccatgtagatgaaaaatcaatctataataatctgggccttttgcctaattttatttgacagtcaactcaaaacattttttgcataatttcagtatacagtgactttagcaggagtgtaacgaccacataaattaaaagcatgctatattttgtttagaacttcaccaagagttattcgccatctcagaaaatcaagttaccaacagcaaattgcccttggtatctgtctgcacttagagtgccacattcactatgactgcacatgtaggaggaggcatctgactattttattatgtcctctagcacagtcattcccaaatatttacatattaaaatacatattattttattaagccgggtgcagtggctcatgcttgtaatcccagcactttgggaaatcgaggcaggtggatcgcttgagcccaggagtttgagaccagcctgggcaacacagtgaaaccctgtctccacaaagaatacaaaaattagctgggcatggtggagcgcacctgtggtcctagctactcaggaggctgaggtgggaggatcgcttgaacccaggaggcagaggttgcatgtgatcatgccactgcactgcagcctgggcaacagcgtgagaccctatctcaaaaaacaaaacaaaaaacaaaaaaaatattattttattaaataatttactttacatttctcctttatattaaggattattatactgatttttttgaaaatacatgtatacataagttatttgtggattttctttcaagatagaaaagggggcattaaaacatgtttttatataaagggagtgttgggtctgatagagttgagaaacacaggctcacaggctactgccagcctccctaggaaggcttccagacccttccaatccagcccctgtctgcgctccagcctcattgcctgccacctctccagcctggcatcttgaactccagcttctccagtacaaacagtgccatggatacagcacagatctcaccatccctgcaactgactggccttcctgcctcaagccacctaaaacctccatactcatcctttattatgcctcacacaaagcacccacaacagaaggacaggttggcatccacccacctgacctactccttgggacccagtcacctctgtgagctgtaactccacagctgggtctcccaggaaggcacactggaaagcaagtaaatgacagtgctgctcctgatatgatacatatgatacatataataatgtacaggtatagtgcatatgacacataggaggtatatgtgtatgatacatatgacagcgtataggtatagtgcatataatacacatgataggccgggcgcgatggctcatgcctgtaatcccagcactttgggaggctgaggcgggcggatcacctgaggtcgggagtttgagaccagcctaacgaacatggagaagccccatctctactaaaaatacaaaattagctgggcatggtggcgcatacctgtaatcccagctaccagggtggctgaggcagaagaatcgcttgaaccccggaggcagaggttgcagtaagccaagatcgcgccattgcactccagcctgggcaacaagagcaaaactccatctcaaaaaataaaataataataatgcatgacagtggatatgtataggtgtcgtatatgtgatacacgttatagtgtataggtatggcacacatgatgtccataatagtgtatgtgtaaagtgggtatgatacagttgggtacctgaactcttcttcacaacaaaccaccttacatttggggacacaacagagagtcgcaccctgggttgaaaatcttgagtccaggtggcctcaagatagaggtgctcctcttccttcagctcaagcagccccttctctgggctgccttccccacccacctgcccactatgtccatccaaggtctgtcaacttcatgtggcagcaggccactatgccaaatgactagtcatccaaatgtccaatctgccaaaagaaacaagttcactagaatcttgctttttataatcatttaaaaagttttcagctatctgtgttgaatgaaagaattttaataaccttggaagatttctatggaattgtagtcatatacttttcatttatttactttggcttcctcacaatagatggaggtttctgggaagaaaaagggactctctgctaaggaaagacagtttcagatcagcacacagctcagcgtggtagtgggactaaaggcacatgtggtggaaattggggggtgggtggggaggctggaggcagaaactggggagaatgacgggtgagaggagtctgaaggttccagaacactggagccccagctccccacagccctgctgagcctgctcttccaccccgtgagatgacaaagcgactattcagatgagttggttgcaacagcttgtcagagttttatctcaaacttgccaattaaaagagctacttccatgaaagccagttctgagatttcttctgtggtagagacatcagaagcaggagaagggtgtctaagccacactgttagatcaggtgtgatgaaggaatgtgtggtgaaaaggcaccgagggaacagtgctggaaaaatctaacctcccccaagggctgtagatcatgtcacacaaaacagttctccattctgtcacagacaaggtgtgggacaattttctctcacaaagagttgcagtaaagaccacagctaaaagaaacaaggcgtgtgtgggggcggggggcggtgtgcgcctgcgagttctaatttggtaactttggtggagtgggtcgtttgatgaattggttattgggtgtgttgataggagggttagttactgtgaggctttcctaaaagtgcttgcaaatgaagggatcaagatctctcttgaggaatcaaactataaaatgggaggtaggcagagaggagtgtcatttagccgtgaaagcaagaccaaaggagaggctccaggccagcgttcatctcctggggagaggagtcttaaacaatgaacttcaggtgtcacgaccagtcggctgggcatgtgcaaggtggagacggaagcagggctcagctgatggatttctagtattcttgttctgtgctcagaccttccctattgggaggcagatgcacccgccgaccttcgttgatgcagttaaacatttactccatccagctgcccttgttctgattgaaaacgtgccaagcatccttctggttataatctggcctgccaggtagatctggatgatgtcaatgagccggccctctggagttgcccctccattttctgtgctcaataagtgagcagagaaggatctactctcagggtgctgacaaaatcaagtgtgtgaccaagcccagaatggggatacgttccagaatgcagtgagtacctacctgagctccctgcctgcctgccctggggagcctctaccctcacttgcccctcattgaatatagtgcttgcatctacttctgcagtttctaacacaggactgtggtttggggttacccacccatctccctcccagcctccagacaagtacacacagtaacttattcaagtttgtatctctggcacctggaaccctgcaaggctgtgggctagctgagaacagttcctggtgcatggcaggccctaaataaaaatgtatgcaatggatggatgaatgcaccatctagccattctttagcccactcttggtggtcgagccctggcttacccaccatgaagcatttgtgggtaccttcagagcctgctgatggctttcagaattcctgtgacctttctcttggttctcctcagttgggaggatcttcaaatctcttctgtcccgtatcctgcactatgcaggctttggaatcagccacccttggggtctaaagccaggttattgacctttacctatctgtaccagctcagctgctgcttctgtgaaatgagaattataatgcgaaccataccggagaccgggtaggttttctaagagtccctcgggctttgctgtgaggaagaagaggcatgagaaggtaaatattcttcagaatcttctgctgaacagtcctgagatacaaactcctcctgccccactgcagcctcccctccaccccgctcctgacccgggacacttcgagctgtgctcctgcagagaatcaaaggggctctatatttgcctcccttcttcccctcccctcctcccaggcgcctctgaggtgagccagcttgacctgacagcttcagagcctgtcttctggctagggagggagctgacacttccatctggagccaggagcaggatgtgagctctgcacaaagaagatccgtccctgaaaccctgctccccgcctcctccacagcacagcagctggcttcctggggaatcaagtgacagccagactccagggaaccgagctagcaagaccgaattctgggggggtgatccacagtgacagaagaggctttggcgtggatagctcagcagggcagcaggggcagggccagttaacccacagagggacagacagtctcaggactgtggcctcctgctctgctccaatgggcaccgtcaattgtctcataattccctgcttctattagcattcaggacctgaaaatgaccttcttttgctgttttcctgaccacaaggtggattctgcccatcagggcctccctttaccttggcacacaagggcctccatcctggggcaccctcccacctgccccacccctccaacctaactacttgccatttcccaaatacatcgtgcagtgcctggtgtctatcctgtggttcatgctgcttcctctgcctgcaatatcctttccctgcaatagcctcttccacccagcagacgcctcctcactctcttggctcagctctaagtcatatcccctagggaagcttaccaggatgctgcagtcagatggagtgtctcctcctgggcccccacagcccctgtacttccttctgtgacagcaacaatcccacagcagtggaactgcttacctgcctgagctcctggagggcaaagatgccatgtgcttcctagttctgaatctcaagctcctagcacagagcatggtgggaaaaaaaaagtgctcaacaaatacatgctgaatttaactaaatttggtagaaggttcattttcccaccagctctcacagctcacagattaggattccactggaatgtatatacatactaaatcatgtgtatctagttttttttgggtagtggatttattgagattgaatttctataaccatacaattcacccatttaatttcaagtatacaattcaatgttgtttgtacattcacagacttgtgtaattataaccacaatcaagtttagaacattttcatctcctcaaaaagaaactcatacccatcagcattcattctccatttacccccttcccccattccctggtaatcactcatctattttctggtctccatagatatatctgttctggacgtttcatataaatgaaatcatacaatatgtgcttctttgtgactggcttcttttactcgtatataatgttttcaagggtcattcatcttgtagcgtggatcattgcttcattcttttttattgccaaataatattccacattttatttatccactcacctgttgatggacttttgggctgtttctactttttggtcattatgaacagcttgctttttttaatgctaagatattttttattttaaaataatgtcaaatttacaaacaaattttgtaagaatagtaacaaagaacttttttcctttaaccatgtgagagtaaatggctggcatgatgtcccatcaccactggcaactccaggtacacacaaacatacaaataatacttgtgtgtactctcctacataatcataatacaaccatgaaactaggaaattaacattgattcattccttctggataatccatggacccattcaagtttcaccagttgtctcaatgatgttctttagagcaaaagatgcaagctaggatcatgcattacgtcttattgtcatgtctcattagtgaccctcaatctggaatagttcatcaccctcactgactttcatgaccttagcactttggaagattataggcacattatttttcaaagtccctgatatggttcggctgtgtccccacccaaatctcatcttgaattgtacttcccataatccccatgtgtcggggtgggactagatgggaggtagttgaatcatgggggtggttaccctcatgctgttcttctgatgtgagtgagttctcacaagatctgatggttttatgggggcttttccacttttgcttggcacttctccttcctgccaccgtgtgaagaaggacgtgtttgcttcccctaccaccatgattgtaagtttcctgaggcctcccagccatgctgaactgtgagtcaattaaacctccctcctttataaattacccagtctcgggtatttcttcatagcagtatgaaaatggtccctcagcttggattttctgatgtttcctcatgattagagtcagtctgtgccttttagcaggaatattacagaagagaggctgtgctcttatcattgcatcttattaggtgatacacaatttctgtttgtcctgttagtagtgatttttcactttgatcacttaatatgctaggttgtatcaggacaattttactcttttttttcttcgtgattaataaatatattttggggagatactttgagactatgtatacaaatatccactcctcatcaaactttcactcactaagtttagcatcagtgaatactccctagctgaattgttactctcatggtgctaactggtgattttctagtcgcatcttttctcctacacttattagttgttattttattctaagggaaatttatttttttatattagtatggatttgggaattattatttaaagaattataattggttattgtcactatttatttttatatttaaatacgccctgatttagtcagtgggagcccctcaaggtggcttctgtgtcccttcaacacatcctcatcagttcttgagcatttttttttctggcacaagatattctaagctcctcttattctttgcctgcccaaggtccaaagtcatccatttctccaaggagttttggcttctttttagtggagaatggtttttagaaatgaagatatggatactagatgtgctcattggtattgggatatcacttctcttaggccctctcaatggacagagctaaaaaatacacacgtgcacaacattctctctctctcacacatacactacatagatacgtatttatacacattcatacccacatttacatccatatatatataaacatgtgttgaaaatcataaattcatcttaacacctttaattccaatccaacaccacagagttcattcctatgttccttttttccatatttgtaactccttctcagacagtgagagtcctgactcccattatcctcaatatatttgcttatagaatgaacccaaatgtgtaacccatctcccatcacctttggggaccctcacatggacactctccttaccctgatttgactttaaaatcccacatgaggccacagttgtcaccacccctcccatgtagatgctccctttagctccctctggctccaacacattatgctccactgcatcccctcaccaggatgctgctcccatgtggacacactcctcaccttccttggactctaaccccctgtgccacaccatgtaagcactcgtaaatactctctttacactgcttgggctctgacacccaccctgggttgctgccacctgccccccataaggacaccattcttctctcagtctctgatatcctagcctggactgatgccaccaatgccactgcctccccagcctaccccaacatagacatctaccttgctcatcaaaaaggtggggttcttagtttttttaggcttttcacagctgggattttgtggactgcatctccacagtgtccttaaatatgtttttccttctccttcacaagaaattgatcgttaaatctagatgtttcataacattcaggttcagtttcttggcaataaaacttcatatgtagtgctgtgttcttccaccagatagcacatgataaccgattatccatcatttcattaagagttggaaaatgatgttactctgtttctcattcttcgtacgaagagctcctccttctcatcaaccattcatttattttgtggttcatgtaggaaaagcaggtacttgattctttcgccttattttctagtttttaaaattatgaataggttccctaacatcttccaagagtgatcaatgagtgatttttcttttgcctcttaaaaaatattatgaactcatggattgaaatatatttgatgtgtttcagtccagtgcatttatttttactgatgatcaaattgtcttatctttggctagtaggaacctcttcaagttgctactccctagtaatctttgatggcttctgatataacaagatgttctaggttcatcttgtatgtgttgtacccccaaactggaaactgtcatttctccaaaaagcccaaatccccatttggggggtaacagtacttagaggccataagctggtgttcattgttactgggttggctattgttccatagtctttttgatggaataaaaaataatcagaccatggacagaactagaaaataatgacatatctcttgaattcatattgatactaccaattcagattcaggattacagagcttatccttagcttcaacagtcttacatctgtatatcctttctttcacactgaaaatcaaaattcccaatgaaagcaacataattattcgcttcctttatggcactatatatccagtagtctcagattaacaataccagcgctgtcatcaccaatgtgcgtatattgataaacagttctagaatttttcgcagttatttttattaggctatatcacacttgggatgataatcaaattaatttgtctttaaattgcttgaaatagttctttctgtgtaattatgctacaataccaattaacacatagattactctttttaattttgctttcatgatttaggctttttagaaaaaaatttatggattactttgtaaaaataattttattttacaactgtaaggatatttgcatggttccagtgacatctacaaaacaagatatcttaaaagagatcttcaaattccctctattagaatttgaacagttcctaaacatgcccagagtattgtaggcaccagaatcttaatgttctgcaatatcaacactccaccgattctcagttcttcatatcagtatgaagatatgatataattcaaatacaggctttgtcctgtaacaaagaccctaaaatagcaataatatagaattaccacttaatatttcaagtataagctctctagggctgatgtgatggctccgaaaggatcttctttctccagtactctcaacacatggcgttcatcctgtaatcaagacagctgcgccggattctgccctcccagccccacgccggccagcaaggagaaaaggggacgggaaggccaattctctggaagggcaggacctagaagctgcacacacaacttccatttatatcccactgatagccaaatctatctcttatgaattctgccttggtttctacaatgaaaaaggcattttctggttgagttgagatacatattcagctttattttctacagttcttttcttatcgtattttccttttacatgtaaaagttttgttgagtagtatcagggaactaaggctgtttttttttcttccaaattgccaatcagcagggtcagacttgggacaggtggcattgcattgcacacccagatgatcaagattgtctagaacgatttcaagtttttgtcaatggtggttgagcacttatacaaaccaggcttccagtcagcatctaaagagatgaagatagaaaagacccacccaattcttgcttttaaagggcatagaatcagggaggtaaatcacaagcaagtcagcaccattgagtagactccatgccgggattgtgtggagggaagagcacacagacaaacatcacaaagaaagtcacacttgaaccaggaaagaccaggggtattttccaggtagacatatgagggaggagcttttcagggcacattgcttaaatcctctgagctctagtttcttcacctagaaaatacagcggtagtgcctccttcattgacttgttagaattcagggaagggggccaggcgcggtggctcccacctgtaattccagcactttgggaaggcaaggtgggtggattgcttgagcccaggaattcaagaccagcctggacaacatagcaaaaccccatctctatcaaaaatacaaaaattagccagtctcataacccagtctcaaaataaataaactgattttaagatactttttaaaagaaaattaaaaaaaaaaaaaagaattcagagatgggacctgggtaagtcttctcctgtgtttctggtgcagcagtggattaacataagggacactccttcaccttccctggtaggagatgccagcagccctggtgaaacgactcctctacccttccttctctgagcctgagtaggtgggatttccaaacagctcaaggcttcatggaggaagagcactgaagtggagccacacaaaacttcctatacctgggtaggggtgagggctaagaggaagctggaattgaacctcgtcgccttcatagtttccacaggagcgagacccagccttttgctgcaaaactgattttggagtggaagatccaggtggcagagccatagcggccatgtagctaattcactgcatgactttaggcaagtcgtttcccctcatttgagaattgattcttctagctccaggacatccagagcatcctctggccctgagccagtccagggatgaagatggggaaagcggaacgtacacctttaaggccgtcatcccacccttaatggagtccacatgccagctgtcccattgccaggtcctcaggccagcagttgccatggtgtgtggactcagaaggcatgttgctataataaaatgtgtttatttgaatacgaaggtcagggagttaagtagttggtattccagtcgtatagagtcgtttgcacagtgtcactaataattaaagagggttttgactaatctagttgctcttcctaaatatactctgctcaagaaactcatcaaagcagcaaagtaatctttgaggttattaatctcctctgcttcacagctggggcaaatttatttgcttgaattagcatgtaataaacttataataaagctgccagagccccagcttgggagagatcggctccatgtaatgggtagttacatctaggaaatggggcgctagtccctaggccactgctgcaagcctgctggggctgggggcctcccccaggggccacacagagaggggccaccaggcatgggagaacctgagatggagccgaagggagctttgcagactggtgactctacctcctcatctctgcccctccccattgcacaggtgaggaaactgaggctcagagaatggaaggatgtgcctgacattgagaagagggcaactctgggagcccaagttagaatccaggcgggaggcatggctgcccatccacccctgcccaggggttggcagtcctcacggtcgggagttttccacccaggttctactaaggacccctgtctgtgtcccttacttcccttttatctgcccctctacctgtcttttccttacactacaactccaccaagacttgtttgccttccctgcttctccattttccaaggaattgctgcccctctgccctgtctggaggcctgtctgggctgtctgtgtgcttcctggctgcagcagccttgttggtccctgatctgtcggcatgcggagagtctgcaggagggactctgcagtgtcttctgagccttggcatacagaggagccatcaggctgggtgatgggcagcctcgggtgggggcctgagagtttcttctacttctccttttcctttctcctttcttcctgcccctaggaaaccagctccatctggtctttgagatttgcttctggagtttgaggctggggagatattgtcctgattcccatctggggtgggagtggtaggtatgggtgctggtagaccctctcttcttaaaggggagcagctacaagacaacaaccattctcgccaccttgcatagcattgctttgaaggattataccaaaaatagcctattccatgaagtgaggacaggagaaaaagaagaagataaagaggacaggcaacaccatcctacctcttacatagccatgctcctcatcccccaatcccatcctccagctccttatccccttcccctcatcccccattcttttatcctctcatctccctaccccatcctcccctatcccttcatcccccatctcccatccccccagccccttgtccccttttacttatagtctttggaggagaatagaaggggaagcaggagaagagcggcttcctggagttcttgcagaccctgaaccttgcttcagacacctctaggacaccagcatgagggatgccttccagcaaagcttacacctgcagcattcccaaagtcacagacatttcttctcaagcaatggataataaaaatagagtaactcatcaccggagtcttgaaactctaaacactgagaaccacctatccgggtcaagttctctctttttttgaaggtcagagagaataagtgacttgcctaaaattacacagctactaagctcagggccaacagtggaaccaggcgttctaaccccctcttgggagtctcctcccaccatgccaagcagccttagacaggggcacatgatgagagtcccctccttgccaaccaacatgttgacctatattccaggacctggatggctccctagttttccaaatcatttactcaagggccctcaaaccccttcttcccattcaatttcctcattactccttaaaagtgatagtctaagaggtgccttatcttggagtctttatgcctggcacagctcatagaagcacaacatagactatgtggtatggtagaactagacctggcctgtgaggtgcctggtgctaaaatttaggacaaacccaatggtaggtgctgttggaggaagaagagtctggcaggaagaacataaaacctggtggatagcacagatatcatcctggtggtgcttagcatcggggagccccattcattggggacaggttgccccagcccatggacaaaactcttgctccataactgcccacacagacgagctaagttcacatcttcaccatcatcaaggtggtctaggtcagctcagccaggagggttctccccaccacccttcacagtcctctgattctacccggaagctaaggagcaaataattttagccctttcttggtggagatggcaacggctggatcctagctaaggtatcagaggtgtcagtgtcaaaggaatggcagaatggcctaaacttaccctatggtgataaagtcattaagaaaggaggcaggagctagagaggccttcaattatttttcatctcccaagctttctgtggaaacccttggtgagatccttattttcttcgacaaaggagttttgggaatgaagtggaaaagaatagagtctgccttcacaagaactagttaaacaagtctttgtggaagagaaaaatcgtcagaggagggtgaacccagactcaagtcaggagagcttgaaaaaacacacaaaaaccatgttgtccacaacctgaagggcttctgagctgtcgtgggagcaagaagaatctgccaactggagcggatggtgacatgggactgggtggtaaggaggaagcagaaacacctcacctcttcactgagttccaaatgtctgtatcacagaggacggtcttcaaacacaaaagggtcaatcaaacacagttaagagagaatagatccattcctggaattctgtctaaaggaaggaatcttcagtaggaaaaaaggcatgcacaaattattgcagtgttgtttaatgaaaaattggaaacaaataaaaggaaggccccaaacaagagacaatttaagcaatctacagagcgtccagtctatggactcttacaaagcaatcaaaatgcctccagactttgtaagagcctggaaactacatgctgacatgttaagtaaaaaataaataaacaggccggcgcgatggctcacgcctggaatcccagcaactttgggaggccgaggtaggcggatcacctgaggtcaggagtttgagaccagcctggccaacatggcaaacccccagctctactaaaaaaaaaaataaaaaattagccaggcatggtggtgcacacctgtaatcccagctactcaggaggctaaagcaggagaatcgcttgaaactgggaggtggaggttgcaacgagccaagatggcgtcactgcactccagcctaggtgacagagcgagactccatctcaaataaatacaaacatgcataaattattaaataacaggaggtaaatttgcttagacagttcacactctattatgagcatgtactactttttattttattacctttatgtgagaaaaactgtggcatatgatattttgaaaatctttataagatatatttaaattatattatcatatgtttaagcagtctaacacagactacacctagaaaataggtggagggtacactaaattataagtcaggtaatgtctcagaggtggatatttcctaaattttctacaaagaatacatctttattgtattatattggggaaaaaatctcaaaagttttatttcaggagagaaagaaggagaaaggaaaggagggagagagagagaaaggaagaaaggggaggaaggaagaaagaaggggagggaagggaagggaattggactcaacatatgtaaagtccgagaaactctggtcttctgagttcagttctccagacacaagatcccagggcaagaagctcgggacaagtacagaacgcctggcaggcaggcatctttgagggatgatagcaagtgaagagatgccgaactattgacagcccgtactctgagttttaaaagaaaacaaaacattaaatcccagtaacaacaggctggtaagtttgataacaatctctggtaaatttctaagcatgaggacttacagaagggaaaggggcaatccctagaggccagcatgagttcaccaaggctgagctgtgccccactggattcctgtcctggagggacaactaagagaggagggacgagtaggtgcctttgacaaagggcacagtgtggccattcgagtgtcaaagccgctcgggtcctgaattagaaggtgaagtgttgcctacctaaggttcaggtgccgggcaagcaggtggggccgctatgtcagctcagcgggcatctccgacaataccccaaggctcagcccttgaccttgtccacctcaacccttttctcagcaacttggatgaagtcaaatggaagatgtgcttatcagatttgccgttgacacaaagccagagggattgttaatagaaaggatggcagaatcaagattcaaaaacatcttgacaggttgaaataataggctgaaaacatgtaaaagggataaatgtaaattcctgcatttaggtttaaaaaaaattttaataaacatcggacatgaaaaaggaggcttaaaagcagaaaagacagctaggtaggagccagtggggcatggttagtgtgcagatcaagggaaggcagaaagaaaagaaaagaatatttgctaagtgtatcagaaactgtactagatgcttttttatttatctgagacagagtatctctctgtctcccaggctggagtgcagtggtgcaatcatagctcactgcagcctcaacctcttgggctcaagagacccacctaccttagcctcctaagtagccaggactacaggtgcaccccaccacacctggctaattttttcattttttgtagaaatgaggtcagtctcgctgcgttgcccaggctggtcttgaactcctgggctcaagccttccaaagtgctgggactgaactcccagcactctgcccagtttgcccaggctggttttgaactcccacctcaaccttccaaagtgccgagactgcaagtgtgagccactgcacctggcttccatctaacttttttatttcttatttgtagagatgccatcttgttatgttgccaggcttatttgctgtaaattattgcacaccatgtctatgggccagacattatcactgagcccattttacagataagaaactgagactcgattatatcattagctgattaaatgattcatgtcaagctattaagtgattcatattaagctacaaagtgatggagtcagaattggaactcacgtcttcctgtctccagagctaacactctatccctcctctgctttgggagtaaatcttggttaatctatgttaatcacaatgattcctttctcctcatcagtaatggttttcaaaatgggtcatcatttacctcttgccaatgagacatggagataaatatgttggtggagtttccagtaaagttttctactttcttaaaaataagcccaagaagcatctggccctgctcctcttccgcctctaagtgttgtcatcatgtaggatctggaactgcaggagccatctgggcacctcaagaatctggcattagatgaaaagccagatgtggaggatatggggtggagaggcactgacctaaccaaggccacccagggcttctccttgggagatgatccattttcctgactgttcaaaccccttctgcttgggttttctgtcagactctacctgtatgtatcctgactaatacccaaggctgagtgagtcgcctctgccagccctggcaaggccacatttggagtcccacacacatccatatacagctgggcccatgggttgcttcagccctgcaggctcagacctacctctgttcccagggcccaaggtccctaggatctacctcccttggccctgtgtgtgggctgggggtggggatggagggtgtccagccctgtcctctgctctgtcttgttgaaaggtcaccaggcagtgctttgcccaggcctgagagatgatgacagcatgtagggaaagctgtgagccagaaaacaaggggaaagtgtggaggtgagacttgggctccattcactcatttaactaagtcattcacacacttgtttattcattcattcaacaactattaatactgtatatattgagcatctaatatgtttaagtgctctgtccaaagacttagcacaaagattgggaaactttttctattaaggaccagttagtaaatattttcagctttgtgggccatatggtctctgttgcaattactcagctctgccttatagaacaaaagcagcaatagataatacgtttttaaaagtgggcgtggctgtattccaataaaaattacagttgttcccctttatccacaggggataagttccaagacccccagtggatgccgaagccatggatggtaccaaaccctatgcatgctatgttttttcctatacatagatacctatgataaagtttaatttataaattaggcacagtaagcagttaacaactaataacaaagtagaataattatcacactctactgtcataaaacttatgtaaatgtggcctctctctctcaaaaataccttattgtactgtaccagaggtaactagaactgcaggtattgaaactgtggataaggagggactactgtatttacagaagcaagtggtgggccagatttgggcactgtctgtaatttgccaattcctgacttagaacatacagttggagaaggtggtggtagatgctatagattaaataaagctttgaatagcagcagagaatatgaattttattgaatggctgatgggaatttgaagaatgtttatgctggagaacaatgagatcaaggtgggtgatggagggattgattcagcaccagcttctttgccaggcactcatgattccttcacttactgaatgaatatttattgaatgtctaccatgtccagacactgtcctaggtgtagggcagacagtggtgagcaaggcagtcaagatgcttatctttgtggagcttattctctcccaagttctcagtgctttgtgatctagcccacgcctaccctgccagcctcaaattctcccactccccacccactaaaccactcaaaattcctgaatgttctttcccacttctgtgactttgcacttgctggtgtctcatcctggaatgccttcattccaccttgtccacctgctgaaggccttagagcccagcggagtctcctccttgtgaagcctttgcccccagctttccctgggagagagttggtcactccttctgggcttcccccacactttgtacccactttagctcaagtgcttctcatgtgacattggaattatttgtccataagcctttcacttctataagagcatgggtttcccagggtgctgcgtccccagcacctggcagaggccaggcatatcaaagtggcccaacaagtgtttgttgaatgaatgaatgaatgaatgaatgaatgaatgaatgaaaatatctttgggaaaggagagagttatgccagaaaaaaggtgggaaacctcaaacctgagaagaaggatgtctgccatcttagggatctaaatgcttaaaagatgcaagggattttatttacaggcttaaaactcctgttgaaaattatttgttgagcgtgaacaataatacagtctctccctctctgaaacgccatggtgagggctcctttgtctgataaagggctgtcgggagtgactgatgggctcccgccggacagctgaaacctctactcctgacagcacgagtgatagccgagtggaagctgaccccagctgacacagtcatcttaaaatatctccagaagaccaacaatgaaggagtctgtgatgtcagggctcagctggagaccagaccaaaaggaccccaagaaattagccctgggtgaattgtattccaggaagcagcttaatatccagtcagaatgaatgaaagaccatcatcagcaatatcaagaagcgtttattcagcatgtattggcatgtggtactagattcagttcagatccagatccagagaataacatagacccaaccgttctccaatggcaccttgcaacacacaaagaaatgtaaggattcagccattgctatgggcctttctcggttacaaagagctttcagcagcacagggaaggaaatagaacaggtttgaatattatttccacttcagaggtgaggaaaccgaggccactggagacctcccagcacagactcaagcccatgtccagggctcatgccccaccaacatgcctgttcaggaagggactctaaagacatggaaaggacagtttctgcctttggaaacctatagtttcacaaggagcccacagatgtcaggaaagcagagccacattggtatgtgcagcaaagaaaccagtgtgcaggaaaggcatgtgcttgtggttagcagaaggcagggtggtcagggacaccttcgcacctcccctcactatgcctcattgccctcggtgtaaaccaggaatattgcttccttgccaaggaatagccagagaggtcacagtggaggcaggagtcctcggtctagtggctcctgcctcgccacaggcgtgccgcagagctgcaggcagactggaaccagagagagcaatcctgtcaccagatcccggcctcaccatccccaccgcagaaggcctgagttccccgggtgccctctgccccagcacctcttccacaggcagttggcttcctggaacctcagcgcaaagatctctgcagagccccagaatggatccacagggtttctcagggaaagggcagacaggctgaagcctgagagtgcagggaacccccaccaggctagtaaaggtcacaaggacagagaggcggcctgctccaacagacagacagagcaaccggggagagggtccctaaagactcgcagatggaaaggtctgtcctcagcagtgcacttgactacaagaccgtccttctctgactaggacttacgctgaggctttaattatagcttgtcactcatgcaccatccccgggagatggctgagcaggacggcaaaggaaatgaaactctcgcttcagatggctcattctgtctgtcaggaaatttcaaactcacaaacagtaatatcctgaattgtggcagagcagtgcctcctgagcgctcagcctgctccccgacccagcccctgcctcccggtccaggccccaccaatgagtcactccttgctggggtgggacagctgctgccagaggccattcctcacccgatcccagccaggcaaagtgactgacgcaaggtcacccagcagacagttggtggagcagggagagctgtgagcattgcattgctgtgagcatagcattgtaggttcttttctgacacttcagcatcccagaagggtaggccgcagccatgataataggaacagtttgtgatcctctctgtctgccaggagctaaggctctgtgtaaaccacctcacttaatcctctcggcagccctcatgaattggtttgtaattagtatcctcacttttcatgaagaaaatccaagactagagagcttgttcaaggtcacacggctagaaccaggtcttgaacccaggttgcccaacaccggagcctgtgctcctaagcccatacttgtccttatacttggacccggataagtaggtggcaaacctggagttctagccattcccttctgccaaggggcacagattgtttctggaagcattcaacaaagggcatcccccacatgacagagacagactgtccttgagctcggctgtgagtgtcaggggtagaggggtggtgtccttgcatctggtcctcaaggttggcctgttgcggtgctgttggcagggaggggagctgtggctcaggcctggctcccggcagctcagccatgagatctgtgctctcactgggcagcttcacatctctcagtccctgggtcttaagtgggacatttagaatggactggggttaggcttaaaacaggacatcagaaacttggggccagtgtgacccagaggagcacgaggcatgccacacagaccccttcccagcagcagggcccagagaccactagcctctctgctggcagtctccctgggccacctaggaataagctgctttggattacctaagtcgccaaggtttccacctggtttgggaaaagagaggaatttcagccttaagacactccagggcaagaaaaatcaagtacagtgccaatggggaagggcaagctgcgatcacaccactgcactccagcatgggca[137 bp omitted]atggagaaaccccatctctactaaaaatacaaaattagccatgcgtggtggtgcatgcctgtaatcccagctacttgggaggctgaggcagaagaatcgcttgaaccgaggaggcagaggttgcagtgagctgagatcacgccattgcactccagcctgggaaacaagagcgaaactccatctcagcgacaacaacaagaacaaaaaacctccagcaagttaggctcctgagggcaggacttggtaagaatagaatgctctgagtatttcaaaatgttttattttcccctccccaccactagatttttctgtgcgattcactgtgatgaccaggtgggccatggggacctggtgactgggtcccccctgaggctcttctctctcaggtttgcccatgcagagcctccaggaatttgtcaattacagggcatgtttttaccccagaactggttgccacagaagtttctgctccagtaagttgtgattctctgtatccacctgtctttacaatttggggtgcagtggtttgcccggtgacctcaattctgtggtggatctaagaagacttgcttttcagtttgtccagttttgtacttgtggttaggatggagtggcggcttctgagcgccttcgtggcatgtgtctgtggaaaggccttgtgtgatgtattgagtccagtggactcggttcattcattcagtgccctctttgtgctggcattgactcaaggtctgcgttcttcgtcttgctattcctcacctcccagaaggaaaggtgttacagacgtcactttacagacaagaaaaactggggaccagagaagttaggccatgcagctgtgagggtgaaggtttgcacgactccaaagcccacatgtccctatgctgatcacgtgctgccgctcactcttaacggttttgtccctctccctgcaaatgccctctgatcagccaagcacacagacccacccctggtcccatgaggaggctgtggagcactccatctgtgctcgggtgaagggttaagctgcctcccctcatgggagggagggtgctggcagcccccttatggcaaggtccggttcctgggaaatatgctcaagtggtgcattatagttttatgaatccagctccttctgttgtcctgattgaagtacagaatgcctggggcaggctgccctccttcacagacccatttgtcatgggaattgattagaaaagaaaaaggcagcttgatggcttgattgcatttgtttgaggcaggaggaggactgccacctgtctctgccaccttcggcttggccggaccaaaggaagtgccagctctttgtcccaaagcaagagtgccctgaggagtgccacagatgctggggggagctggcggggtcaacatggtagggaagcagggtctcctgagcctggggtttggggcagcgatgtgccctcttggccttggaggaggcggggacacagaggagcatctgctctgaggccactcgccagaggcttcagaagggggctgctctgccttcagggtcagaggcaaagaaagggggcagcttagtctgttactaagcagaacctcccacaccaagtggcaagggggcaagccccaggaaatggagggtaggatgagggagggtagccttaggggttcactgtccccacatccagactgtcccaatgtggcaacggagtgtgccactcagctccccccacttctgtgtgattcactgtgaggtaaagctcagaccctgagcaaggcagccacgatgcttgagccacctgcaggcagcagggctacatttatccgcaggtcctgggaaagtcacaatatctcagaccattggacccacctcgtcgttcaacagaggagggacttgcccaagggcacacaatgacacttggcagagccaagacctgacccacctcttgactcccagatgaggtggcaagagagaatgggatcaaccactgtccttggccatcaggactgtgaggaaaagaatagcaccccttgccagggtaagcagctgaattcaccttggccttcagcagggagacccaggcctctgacagtccgtcctcttggcctccttccagcaagcccctgtttcaggttctcacacgtctacaccctggccattgctgctccagggctgagaggtgctgcagggaaggaaggagggaggagggaagggcaggaggagggcagtccgtgccaggagactcaggggacactgagatggaagagcaggcttattgacccaccacatactggctcggatttccatattcagcacatactggaagaataaactcattgagatgccacattgctttccaagacatcccaagaggcacagggttggaaaggcctaaacagagctgggagtgttcctccactgtgagcagaaggcaggaagacacctcctctgggactggccagcagaggcctcacagctccctgcagcctcggacacgtggtgccctcagctgtccctgaggtccagcagagccgcccgtggagctctaactccaggagattgtgcacacataaggtggatagagggaacgcactctggggaaacaggaacccatcttccagctcttacacacctcttcctagagactgctgaatatctcccatgcgccaggtctggggatagttggatgtgactataattcagaaacttcttccaaagggcttatagtctgatgatgcaggtgactgcaaacaggtgactgcaacatggtgtttaaaaggccgagatgctggtaagcaaaggtgttatggaaatacagggcttttagccagaaaggagggtcagggcaggaggcttcctgcaagagctgagtctgagaggacagggaggagttagctggtctgagtggtgtgacctaaggcagagggcaaaagcagcactgggcctagacacagagctgggaaacagcatgttgtgcttggaggattagaggatggtggtgttgtcaagctcagaaggggaggctagggaggcagctggggccagggctgcagagctcagatgagcttccagggcaaagggcagcatgatgatcagagtctggtccctatggggcccatcttctgtgatcctttccccttccatgggtgctgttcctttcctggccatgtgctgccagagggaccccaaggctccacctgtcatgtggccccatccaatgtcacccctaggccctgtaggccgagtctatgcagctcatctgtctcccacccacggcccctcagtcagtccatccacaaagtctcctcttcacttaaggacacagaactcccaaggaagggaagagcctgtagctggcatctgctccatggggccctttagatccaggggagagatatgtggacagggcactgccaaaagttagaccccccaaaagcatggagaaggcccaccaggggtttgatggagatgacaacctgagagccggcatttgtctgttcctggggcttcccaccctggctgcacattgcgatcatgagggttgctctcctgagtagcaacccctgggctctccccaaaccagttaaatggattctcagggtgagtcccaagcatgggcatttttaaaagctccctaggtgattccagcaggcaactcaagctaataaccaccagtccataccaaccaactcagatcccatctttcttgttatgccttcttcctctaatctcacaacttctatctctcccactggctctctccttccacctgttccttctcttcttctccaaggctgacccctctgctaagctctggatctcatctcctcccatcatctggggaaccagactccaaagaaaacaatgatactaatagtcataataataagagcagcagtattcatggagtgcttaatatgtaccaggcatatgaatgttctcatttggattttgtcctcagaacaaccctttactataggtactatcattgtccctcatttcagaaaaagaaactgagttccagggaggttaagtattaaatcatataagcccaaggccctggcactactgagcagcaggagcaggactcacacccaggtgcctgtggcactgacgcctagtccttagctgtcgtggagaccacctctccattgctatcttgggcctcccttgtctgcaacctccatgacttgcacttccttggcaggttgatctgccttcattctcattctttccatgccagccactgagttagcctgcaagttccagagcagacactgggcgctctgtgtcccttgtgtctccacaaggtatccccaggtacatgctcagggcaggtgagccctgggcccccagggctctggaagggctttgttataacctgcttacttgtcagtcatgccaaccatatggtgagcccttcaaggtaacacctatggtcttactttttagggaggagaaaaggatcatctgacttaaataaactaaaatttccaaaaaattccaccggcttgaaaaatgctccattgtacccagatgtctatttgatgcctaaagaatgcaactgcttgcatgtagccactccatccacactgtttcccccttgcctatggggctttgtgccatgaggatgatcagtaagacatttttaggtttctgccctggttagagtgagaaggaacctggcgggggggggggtgtgacatggggcacagcagacgtgtgtgctatgaggcatgcagaggagagatgtgtgggtgtgggtatgggtatgggacatggggtggcaggcatacaaagtgtgtgcatgggtgtgatgtatgtgtgaatggtgtgatgggtgtgtctcatgggtggcacatgtctgggggtaatttttgtgcagtgcattgagtgtggtttgctgtatgtatgatttgcagatgatgtgatgtatatttgttatgtggtgtgtggtatgtttctatagcatgtgtggcatatatgtgatacgtggtatgaatgtggcctgggatatgatgtgtgtgatcacagtgtgtgaaagggtgtgaggtatggggtcatttgtgtgtggtgttgggtatgaggtgagtgatctgtgacatgaggaaggaaagagatttagcccctctcatctcacttctggcttctctgctcagcctgggtcctgtatgcaccttcactcatgcagtaagactcacagactaagacccaaggtgtcccatcctgaaagtgacacagcagccatcccaggaagggagagcttgggctcagcactccccatcaaggtaaaaccagactttcttcattttctcagctgctgagagccctgtaacctgggagctcagcttcaggaatgccaacaaggagaggacagagtcctataaatggtcaagaccccactgcctataagcaggcagtgaatggggaaagcccatatccttaagtctcttcccaaacccagatggtcagttgataggcagaacattgaagacaaaacgttggattgaaaatagaattcctatttatcttctccagttcacaatgggctcagccccatgcctgatgtaaccctgataaaatctggactcatgtggctcatcgagagttattatgacctagaagcacaatgcaatgccattccttactctctatcttagcactactaaaggagactcagatccaatggactccaacagcacttactaaaatcccattcattctacttccttctttccctgcagctgcttgggtgtaactctcctcaaccccctgaaaaagctcctccttggctcccagtttgtgaaattctcctctgctcttcctacctcctccagcactttaagatgtagaataacttggcctttctgccaacaagaaggaaccatttttttataggggctgggggtaggctggtgatttcaggatcctctttgtaggagaggaatgtcagggaatagcaccacatttgagaatcttggatcctggtgcactaaaccatgtggcctatatgagttgcatgttctccctgggactctttccacagctgtttaaggcaaccattatcctagcaactcactgcttcacagaattaaaatctgctaaagagccatgctaatacccagacaaagctttaggagaaaagaatagtacattgatgagttatctttcttacctgtccattagcaaggcagtacccatggcagtgcagtgcaggacagcagccttgaccagaactgatggaaagctgcagagatgccaccggaaactcaaattggaagtcagtgccagcattttaatacctttctatagtattgagttggggtttggggaaggctgggagggtttacaggtgacattccttcattacctaggacagagaaggaggacacacacacacacacacacacacacgatgttcttgtttcatctttctacacccaccctcaatttttctgaatctcattttcctcacttgtaaaatgaaggtgacaactgcatagaacaatcctttagaaccagactttggaacctgttctaccttttcttactagatgtgagacctcagacaagtaattcaaccactctaggtcagttagtgattactgcgaaacaagctacttcaaaacttaatggcttaaaacaataatcggttattatttctcatgagtgtatgagtagcctgggtggttctgctgatgtgagccagacttggctgatctttgctgaggtcactcatgcatctacagtcagctggcagatcagctgggggctggctggtctaggatggccttggctgggataacttgggtctgttccacatggactctcatccccaggatagcctgggcttgttctcataatggtgtttatttccaagagagtgagtggaaacacacctgggctttttcaagcctgtgcctgcattaagttttctgccatccaattggccaaagagtcattcgactgaacctggagtcagaatggaagaggcctataaagttacagggcaaatggctggatcacagggaggcaagtaataagtgttgtcagtgtaatcaatctaccactacctttaagctcagtttccttattttcttttaattgaggcgaaattcacataacttaaaattaacttttctttttttttttttttttttttttttttgacacagagtctcagtctgtcacccaggctggaatgtagtggtgccatctcggcttactgcaacctccacctcctgggttcaagcaattctcgtgcctcacctaccaagtagctgggattacaggcgcccaccaccacacccggctaatttttgtatttttaatagagacagggtttcaccatgttggccaggctggtctcgaactcctgacctcaggtgatccaccacctcagcctcccaaagtgctgggattataggcatgaaccaccgttcctgaccaaattaaccagtttaaagtgcacaattcagtgatatttggtacattcacaatgttaggcaataccacctttatccaagttaccaacattttagttaccacaaaacaaaacctcacagtattaagcaggtactcctcatctccccctctgtcctctccagcacctgacaaccaccaatctcttcactgtctctatcaatttccctattctggatatttcgtataaatgaataggtgaacggtgtctggcttctttgacttaacatcatatttttgaattttatccatgttgtagcacatatgagcacttcattcctttttatggcataataatattcctttgtatgaacatggcacaatttgctgattcattcatttattgctggatatttgaggtgttttcatgctttggttattgcaaatgatgctgtgacaacatgaatgtacaaaatttgtttgagtaactgttttcaatttctttaggtccataccccccaaaagagtagaattgctgggtcatatgacaattttatgtacaacattttgaggaactcagtttcccttattttcaaaatggattactttgtggagatgctgagaggcttagagagtgcatgtgaagtgtcttgcacagaatacgacttcagtaaagggtttatataactattcttttgttccttcattcaataaccatttattgatcccaggatcaggaattatgtgagatgctagatagatatgtggatatagacgatataaaatatctataaaacatatgcctatatttttatagacatataaatatatccccagggtcccttccagctcagacttacaatggttccctccttggttctcgcctggtgtgtccttcacaaacagaagacaaaaggctctctctccctccctccctaactgagtccccgggaggtggctggcttcattgctccccacctgaatcagttcagaccacctatttcagatctgtcggctcttataaatgtagccacacacccgcaaagtgagacaaaatggcaatgtgattagtgtgtgtgtgagtgtgaatgctcatgtgtccctgtctcattgcttttgtaaagattaatacatcagagcaagcacttacgaagggaagaataaaaaacaacaaccagatccaattctccagacattcaataaccgaatgtcacccacatggtaagcaataaaataaaaatatatgcttagcagaggcaatataaatatgatgtatattttgaagttggataacagaacagtggcataaaaataatacccagtggcaaattcaggaaagagaccttttaaaaacacagaatgtctttgggctgccattcctaaaatatcgcagcgtctcaagcagtaaaggagggcttggtttaaatctgacaggagcacctcatgtaatgagggcatggaaattcttgccagcatcccagtgtcaaggcaacatctacttctcctccaccccccactactccactcctgagagctgccccctctacaatctactggctccatcctctctgcctgtctcaataaccccttacttttctttctttctttctttctttttgagacagagtctcgctctgtcaccctggctggagtgcaatggcacgatctcggctcactgcaacctccgcctcttggattcaagcaattctcctcctttagcctcctgagtagctgggattacacgtgcgtgccaccacgcccagctaatttttgtatttttagtaaagacagggtttctccatgtgggtcaggctgctctcaaactcctgacctcaggtgatccactgcctcagccttccaaagtgctgggattacaggcatgagccaccgtgcccagtctcaacaatctcttactttttaaaactccttcacaggcattattccattcaacctttacaacctgcctctgaggttaagaggacaggtatcattattgccattttatagatgaggaaatagaggccacataagtggtctgaaacctagaactgaaacgccacctacctgcccctccaccccagaaagaaaaaatgtcttccttgtcttagaaactgtcattttgcactcacacgtgcatacacacacaaacacacacacacacacacacacacacaaatcattaaaaagatttctgcacaaaaccaactcctccctctgtggcccagcacaaatcttgattcccagctactatttgtttagggaatacaaagcaattttttgtaccaaccaaacaaaatgtaattagaaagtaaatctggaagtgtattgtaaacatcaaaatatatcaacggtagatgctatgcacttcttaaaacacacaccttttgcaagtcttagttcctgagattctgaccagaaaacggcagtccgaaaatgtgtgtactttgcctaaggccttgaaatgagaactccaggactgaaatgcacattgctgctgcagaggaaagaaccacctgttatgtgtttctaagcaaatcacttgacctctctgagttttcatttccccatgatagaaagagtagaaggagaagatctctaagttgctttctagccctgaaatgctctaattttatctctagaaaaaaagacaaatgttgctcagggaaagccctgtgttgctcacagaggggtcagtaaaatatctctgatggaaccctaacctctaatacattcctgtggggaaaaagtctattttagaaacaagaagacagggcactggtcctgtatcagccactaatcactatgtaaccttgagcgtctcctctgctaaatgagaaatttggacttgatgaatatgagaaataaatgtcacctcaagtgccactctgtgaccagtatagatagtggctacctgggagcgagatgttgagaaaaaaaatatgaatctgcctccaactcaagcaggaagagtgttgggatcgatgactgatgcctgccacctgtggagggctccaggcagtgcatgtggcctttgccatccctggggtagatcctctctaaggtgtctttttacttgaactaatcctttgcgagtagcacacggaaaaccaggggattcagagtcaccgatggactggaagaagaacttggcttgttcaactgtttttatattatccatggcttgggtttgaataatctgtcccctgataccactgtattttagaaattgctacctaaggcaaattctccacttttaaactcatttcctgagtcggtctttttaaggcccacattaaatattgatctgccctggagagatctaatttatttagtagagacatgtttgactccgccagaactgtcaaactcaaaaatggggccatacccctcccaaagcaataaccattgacgatagtgacagacaagccaagggcaccagaaccagcggcgttccactgtcagagtctcagggacagggcctgccttctgctttcacacaggtagccctcttgcccaagactattggaagctctctgaaaacctttcccaagaggctggttttctgaaagtcaaggtgtccactctgtgctggccaggctcgccatctgccgccccaaggcctgttggcccatggtggggaaccccagaaacctcttctgcttgctcccagcgagctctgtttctggggctatcgtgaccaagctccaaccttcagactctgcaacccctccctcaagtcctgattctggcccaggaacagggaccctggttctaaacctcagccccagtgagctttggcttgattgacaacgcgctggctgtctcctgtttgcacttaatagactccaaagagaaagagagagagagagaggagagaaggagattttatctgctccagcctggggagaaggactctcatgccccacacagccagctcagcacacagagtggattggaagatttgaggttctgatccagctttgcctttggatctggcctccttcacctcttgcacacagaatcacctgcttccatcaccctacactctgggttgatccagcttaatttcactccatgatctaggcttccaagcacaaatgccgaaattcccttctgggtctctggcaacatctgtttgaggtctagcaaacaagaatccccaaggccaggaacaaagcctatcttcttgggttagggaactgaattataattacaagtcttagcaaattatcctaccctacctgcattccctctgttaattcacctaagtatcctgtgaggcccgtagtgtctttatccccatgagggatatggggaaattgaggctccaagtttgtagccgctgaccacatatggccaactaaaatgaaataaaacttaaaatttagtttctaaatcccactagctacatttcaaatgctcaatagccacatatgcctggtggcgactaaattgacagtgcagaattacagaacattttcgtcattgcagaaagtcctatcacacaacactgtgaggggtagagtaacatccctgtgccatgcagaaaccgagtagcagagttggtacttcagctaggccagtttgtctatccactacccttttctgctattgaaaggaatccgaaaggaaagggttgagatgggcaagaggtcaacaaagaaatctcactcttagagtgaaggtttttgagggacacatctgaaaagtttaagaccttttgaccacctcctggtcacgtgacagctgtcaccagcaccaggggctacctggctacctggtcatgatgctgctgtttgctccatcagacatctcttccagccctggaggggcttggggtttgatctccctgtggcagtcagttctatcccttatctccctgatgaaggggagtcaagcacacatttgggcacaaaagaatgtcttgcacaccctgccaagctcctgagacctcttggagatagtgaaggtcaatcaagttctagatctccagttctgatccatttatcatttatgacatgccttctatggcccagtctctaattcaggcaccttttacatctataacctagatagtttctggagcccatgtggcttcagaatgtccataaactaaaaataatttaaaataatcgcagtctatatttgtatcactcaatattaaatgggatttgaatgataaatcataacatcatttatttttctcactgtatatttgaatttacactttattttataaacagttttgtttttgtttcttgaaacagaatcttgctctgtcgcccaggctggagtgaagtggtgccatctcggctcactgcaacctccacctccacggttcaagtgattcttgggcctcagcctcccaagcagttgggattacaggtgtgcaccaccatgctcaactaatttttttctatttttagtagggatggggtttc[132 bp omitted]cattccattgtatgaacataccacattttgtctattcatcagttgatggatatttgagttgttttcacttttaggctattatgaatgatgctaccatgaacactcacataccaatttttatgtggagatgtgttattatttgcattgggtatatacctacgagtggaattgctgggtcatagggtaactctgtgtttatcatgttgagaaactgcccaactgttttccaagatgtctgcaccattttacattcccatcagcaatgggttcccatttctctgtatcatcaccaacacttgttattgtctagtcttttgatagtagccatattagtaggagtaaaatggtattgcattgtggttttgacttacatttcactagtgtctaaggatactgagtatctttttgcgtgcttgttgatcatttgtctattttcttgggagaaatgtctattcagatcctttgctagcttttcagttgagttatctttttattaagttgtaaaaaagttctttctctttttttaggatacaagtctcttgccagataaatgatttgtaaatatcttcttccgttctgtgggttgcctttttcactttcttaatggtaccatttgcagaacaaaagtttttaatcttgatgaagtcccatttatctattttttctttagttgcttgttccttttgtgtcatatctaagatttgctcccatgctttcttctaagattttataattctagctcctatacacatcacttcttaatgccttccttcccctaagccattggcctcccctcatctcttctatacttctgctgtccaacctcattctcaggactcattctcaactacgcactgaaaagacttctctctgaaaatctaagcctgccaggttttctttcttacgtttctccatctccttgtttccttctagttgtgtctattttttctttcccatgaataaatctcagccctttctgaaacaagacccttagcttcccctctttagttctgcatcaaaaaagtctaaaacttgggctggctctcttagatgactaggaatagaagattgcaatctcttataatttaatatatttcctttcagcactgttgtacatgccttatctcaattacctcttaaacaagcctaggaagttggccccacaaatcccaatttgcaagtgggaaaacagaggccttggtgtgacagagatgtttgttagttaaaggatcacatcttaaatagaaacctaagaagctgcagagttagaatctgtacttggaatttctgaccacaggctcagtgctctgccacaaaatgctgcctttgcccagagatttccactcagctgctctcaaaggtcatattgataaacaccactcacacaaacaggcacagatgatgccaccacctcctgttctattcaacatatgttccctgagcagctactccttgctgggcattcattgtgagccacattcacttctgaagcagccaaaaagaggagaataggagaggagatggacaaacccttgtgtacctctttgccttctcacctctactctggaagacttgccacatctgctgcatgagccacacccaatacatctggaccctgggaaagtcactctagactgacacctggtgtcaaaaaaaaacatgcccaaggctcactgctcttagcactgggcggattactaaatggattgggtcagatcaagaggcaaagctctgcatgtggaatgaagccaatgcccaaatccaaacccttgcttcccagccacactgcacaactctgcctagccatgctcctccctgagcgctctcttcttcccagcactaagtatcaattaaatagacaaggctgaagttgtgccaactgggtgagttccctcccctagccacacacgtttgctttcctgcatctcagctaccttgctgctcaccccagcatcccagcttgcagtagacacaggacttggggtcccagggaggactcccttgtctgcaagtggttttcataagatggagccatatgtctaggatctcagcagccctctgattgctgtggatgctgagggggagcaagcagagccttgcagcttatagaaaacctttgagaaccaacggctattagcatggagaaaaccatctgttatttttgtcttctatttgtcttagaatttcagggaaagtgagcagttgggctgcttaactttattgttcacagttgggagcagaagagttgaaatgaggaactccagcttccaaagctacaaaccagattgtctcctcttggctttattttattttattttattttattattttattttttgagacaaggtcttcctctgttggccaggctggagtgcagtggcatgatcacagcttgctctagctttgaactcctggactcaagtgatcctcctgcctcagcctcccaagtagctaggactacagacatgcaccgccacactcagctaatttttttatttttgtagagtgagggtctcactatgttgcccacgttggcctcgaactcctggcctccagcaatcttctcgccttggccttccaaaacactgggattacaggcataagacaccacacccagcctctccttggctctttaatccaccataggtttcctctgtcctccaggactaaggttgcagctgtgagttgtggcctaatgaggaatccctggggtccccagaaggatctcaaaggttgctcggaaaaggcctcgctctcaaattttcttgccagattgaggtggaaggcaaggatctgagagtggggaggagaaatggacacaaagacaagctcttccagctgcagaatgaacagaccagcctcctctggctaaaaatgacagcagagatgcactgacctggcatgtatggcctctaccatccttgtttcctgccttgagttcctgtgatttgccccacccacagcctcacctggatcaccccacggtgtgtattatttctagtgcaggtgaccaaccatccttgctttcccaggactgagagagatcttggcctgagggactttcagttttaacactagaacaatcccaattaaactgaacaagttggttaccctggacggtgttaactgattgcatctctaagagtggctgcctgttttaatgaccaaggggtcgcaaagtctccctggcaccctttgggtcatctcgagcctctgacttcaagggtgaaggctgggtatcgggcagatgaaggtgaagcaactgaaggcagtgggtctgtacccacagcactgaggtgtagctgcacctagacccagcccatctccccaattctcagacctaactccatgctccctgcagccatgcgacagccacccacactgcatgacactgcccagtcagtgccatctcccagagctgtcttcttccggccctcagtatccatgatatagaaaaaataagactgaggatgtggcagctggggttgattactaccagcctcactaatgaaaccttgattttctttagatattgggtaactgaagtgtccaggcccaggagcagagttgtggcaattgctttcctcttttcataattggtttagggcgggcaagcaacccaggtatggccaaagaaatgtcaatgtcaatggaaatctgatggggccaaactcatccctttatgaggagcctactcctgagataactaaccaagctcctatgataatagcattaatctattaccacataaaggccccacctcccaacactgttacat[138 bp omitted]tctactaaaaatacaaaaattagttgggtgtggtggtgggcacctgtaattccagctagttgggaagctgagacaggagaatcgcttgaacctggtaggcagaggctgcagtgagcacagatcatgccagtgcactccatcctgggtgacaaagcgagactccctctaaaaaaaaaaaaaaaaaagattcaacatgggtttcggaggggacattcaaaccatagcagtacttaccttcaaagggccaaccatggtgcctggactatatcatattcttaataacactaagctcttatattagtaataatattgttagtattaccattattattacttaagctaaatcttccaaagaaactgcctaaaggccaggcacagtggctcatgcctgtaatcctagcactctgggaggccaaggcgggaggatcacttgaggtcaagtttgagaccagcctggccaacatagtgaaaccccatctctactaaaaatacaaaaattagccagttgtggtggtacgcacctgtaatcccagctactcgggaggctgatgcaggagaatcacttgaaagccgggttgcagtgaactgagattgcaccactgcactccagcctgggcaacagagtaagactctcttcaaaagaacaaaaaaagcagctgggggcagtggctcattcctgtaatcccagtactttgggaggct[134 bp omitted]gagacaggagaattgcttgaacccgggaggcggaggttgcagagagccaagatcacaccattgcactccagcgctccaggctgagtgacagagagagactctgactcaaactaacaaaaaacaatgacaacaaaaaaactgtctaaagttaaagtagggttgcagcccttcgtggtagatggctattggatgggtattacaattaaccatgggtcacggggtccttttgggaagcgcagcttgggagttccagatgtttaaatcttatttggagagattctatgacagaaggaagagggagaatgagactgccacagaagatcagaggatatggaatctgctgtaagcccagaactggaaagacagacttgactttctgttgaggcactggctctggtctccaggcacgtctcttctgctgtttagaggagaatccctgctgcatggcagcatttgggtagccagagagaagatatatgaattgatgaagtagaagactaattggaaataaaaggtatagtgtcagctaatgaactcccaagtcacccatgtgacaacctcagccttccagaagaacacgtccatgaacagcctgaagtggttccaaaactggggagcagagaaggatgcagcaggatgcaaatgagcacagctgacctggacttaaaccatggccctgccacttactagtgtgcagaccttgggtactggacttgccttcctgcggccagtctcccagtgtgaaccatggaaaatcaacactcacctccaaggtgcctatggaagtaagtgggatggtatgtgtgtgttgcctgataaatggccaggcactgtgacaataattcctgctccatggatcgaacacagaaatcagtttccccacttcctagtgccatctcagaggtgttgcattatcggttgctaaagctcagcgagttccacccacacagtcccaataagctctgtcattccgattggccagtctgcagtctaaatggaaaggaagtagaggtagaaagaggcagcaaagaaaagtgagatgtgacagtctaagagtagaggcagacagaaagaccatacagacaagggttagaatactaaaaacagagcaatctggggtagtgttagtgcacgggcaagcagtccgacccctctggggagatcatgtgttacgtgatgtggtatcagttgaccaggtgttaagtctcaaatcatgaaagcctcaaatcattcaaaaaaaaaaaggtgaatgttcaacacaatcagtttaagaatatactatacaaataaagaggtatacattgagcaatagtaccattacaaacaggaaaacagttcaagtgaaagttacaggggcctgactcagtactggggtgcctccttcctttagaatgctggataaatggaatttcaccaaaaaaaatattgaagtctttttgcctctcagcaaggtgttatttaggcagaaggaaagcaatggaaatgaggaagggaaagcaagggggtagggacttggggtttctccttccgttaaaaaaaatcttcaacttggtgcttggctagtgccacccacgaggttcagtcagcctggctcttcttggtggcacgcagggcgtcacgtcccctgtccagcagcaggtcctccagccgcttgcagtgctcccggagctgtttctcgcgcggcaacaggaaggtgagaaccttgttgcgcacgatgccacggtcctcctcctcccttagccgctgcctcacgcgagccgcctgctcctcctgttgcaccagggctccattcatctcgcagaaggcgtcttcaaggtaatgaatggacttcaatgcctctttcttaaagtcctccagttcccgttgcaccccggccaccttctgctgcaggatctccaagtcagcgggtggtgggaggcaggagggccatgactgggacagggaaaagtctccagactggaggccactctctatcatttttttcccctgtagggtattcaccgtcatgagaatggacccagcctggtagaggggttccattgtctcttctacgttggacaaagagaggaagccaagagaccaaccaggtcaataaatatttttggctagagacacgatcattcggagtggagaaaccctagaattgtgacatcagggccccttcagccaaccagaaagaaagccacaatccattcatttgcatattgtagcttccttggttggttacctagagctttgtctgtttatctgaccaagtcgccctcctgagatgtggatccttaactcatcacccttctagaaccagaactcaagttcttctttaacctaaggaacaaaccaagtcccagagcagggaagtaaactggccagagcaaggcaggccaggccaggctcactggctgccaggactgggtggtctcccacactggcaagggacctgcatggtcttggactggtctctgggctttagtacctcactagtaaaacaaagacattgtaagagatgatacctaatcccacttgtagctctaaaatgctaaaaagtaatctcttattccaagtccatactcctataatgatgtcagaattctataaaatcttagaaattgcgaaaaatgtacttagattttgatgtatggtccacagcaatggctgattcagcaggtgcaaggtaaaaatgggttagtcatatttattcaataaatactaagtgctcactacacactaggatcagggaacaagtgagtgcatggtcttccaacatacctgaatgttaacaaatatgagaaacaacacatagaaaggtaaatcttgtactttttacctgataattagaacaaaggaaaatacttctagctaatctacatttggtttagtcaggaacaaaccttcatcttgcacatctcagtctcttgcctagacttctctcctggtctccaaatctaaacgtctcccccacaatgggcctccaattcaagccatccaaagctgaattggtgatctctttacccaaaccagttcctgttccagtgttgctgtcagattaatgagagcaacccagaacagcacacacaccagagccctcatgagacaactggtgctgtgatgctaatatttgtcccctcccaaactcatgttgcaatttaattaccattgtaacaggattatgaggaaggacctttaacagatgattaggctaccctttaagagataaatggattaacactgttatcttgggagcaggttccttataagtggataagttcagcccctttatgtctctctctcaccctctctttgcccttctactatgtgatgtcttctgctgtggaatgacacagcaagaaggcccttgccagatgccagcattttgattttggacttcctagcctccagaactgtaaggaaatacatttctgttctttataaattacccagcatcgggtattttactatagcagcacacaatagactaagaaacttaggatcaacctagacccttccatgtcaaagtggctctaagtcctgttcaatctaccattgccaagcactctagcatcaaaccacctgggttagagtcccagctctacttataatctacctatctttggcagattaccccatctccctgagcctcaatcttttttataagtaggaatactaattcagtggtgtgcagttctatggggaaaagtgaataaaactccgaattattttgatagctgttgccaatttccatggtgtaaatactcccaccgtggccagtttcaagctaccaacatgatgtcactgggaagagatgcacaaaatcagctctcatgagcctctgcaagctgactctcgcaccacagggaccgtgatgagggcagctgcctcctccgagatgcagattaacctatctagggtgccttgtagtaggcatcagagagggcattttgcagggaggttcatggctaaactaaggtggcattttctgggggattttgtggggtttttagcataataaagtgtcaagcaataaggtgaaattttaaatggcaagatgaaaaaagcaactttgattattgagacagaatggtggaaaaagcatttttccaggagtcaggagatctggagactggaattgctgtgtgaccctaggtcaatcaccttccctctcggaacctattccttccaccataatgtgagaaggcaggattcagctgttctgacgtctctgatgtttgaagaatccacacagtccttcaattaaacctctcctgaggcacttaaaatctccctcttctcgtgacttaggactttgtccttccaggtccctgatggcacagtgaactccatgaggccagggatcatggatttctcaccctgtgtaccttcaagcatcctgcctggtgccctgcacatactggcactcagagaactagatgaaatggaacttatttttacaggtggctatcaaatcccgggcaccctggctttcccgctgacatgatgacacctactggtcttagcaaaaacagcaacttcttgattccactacctaagagctagatggggattgaggagctgataaaaacagcatgtggtcttgtggtatatttaattaagggagtgtgtgcatgttggacacataatagattctcaataaatattttttgaatcagcaaaaaggcagtctctaacattctctgagtgcttttctgtttctctctctctctctttctttctctctctctctttctcttattttctgagtctttgtctgtgcctcccacggggaatggtggaagtcataaccagatctgcaaaagaaaagtagtaaaagtcacatggaatagcactttttccatttccatggtgctttttaatgacgttgaagtttgcttctcagaaccagaggggaggacggtatttccacaagagcacagcagagactagaagcaagtgaatgctgtcagcagaagaccccaggcttggtggcctcccaagccttcagggcagcatcctcagcagggcaacttaatgtgcatgttctcctgaatgttatcctcctagaaatttcataatcaaggactatgcctttctcacaaaatttccttccatatatacgaggaaactaagaaagccaatcactttgtccccttaaaggtctcaagaaaaaggagttctaacatctccaggccttgaacccactgtcagatgggtttctctgtacctggcctatttcagtgattacagcctcctcatgtctcaggatgttggggggacaagaggggcacctcagccccacagagatcccagtaccacccttgagaatcagagtaaacctgaatgggatgggagtcagtagtgggcatgttctaatagttccccaggttgggcatcactgggtctgagcaccattcctgcgggaccctgcccatggcttgccagcaaaagccagatggtttccccaggaccccaccccatcctatgccttcatctgtctctgcaaatgaaataagccttggtccttttggggattgggaaaagggacatgacacagaggcaccccttcttcatgtaccttctttaaagtgaggaaaatgctcagaagctagaagctcctcacatcccgtgagttagaaccacatccttgggccccttctaactacatcactgactagaggggtggggctcccacagttggctgaggccgatcacaggccccttcctgggactggggctgggtcaggcctccctgaagcacaaggatcccagtaccagaaccaaattggggttctgttctcaagcaagaaagggagaggacgggcaaccaactgtgtcttccacaaagagtaattagatctaaggaaaagactcggtgaaagaaccatgcaaaatcctcccaaatgaactactaatgtgagctcacaggcagagtggggaagcagtcttctgggagtctcttaaaactggtctatctaagccaggcacggtggctcacgcctgtaatctcagcactctgggaggccaaggcgggtggatcacgaggtcgggagatcaagaccatcctggctaacatggtgaaaccctgtctctactaaaactacataaaattagccgggcatggtggcaggcacctgtagtcccaagctacttggaaggctgaggcaggagaatggcgtgaacctgggaggtggagcttgcagtaagcggagagagagcaagactccgtctcaaaaaaaaaaacaacaaaaaaaactggtctatctctccccatccccaagaagaaaaaattattaaaaaaaaaaaaaaaaaaaaacagaactcagagcaatctgtccaaaccccaaagaacatgtgattggatatttctaaaggagagaggacagctgttggccctatttagccactcttttcccagaatctcctgacccggtgcctcctatggcctgggcaaggatactgtgatacaaccggtgtcttctcagatgtcctcataaaatgtcttccatccatccttccattcattcatccatccatccattattccattcatctacccatctgtccagctatccagccagccttccatccatctatccatctattcagccagccagccttccgcccatccattcgttcatccatccatccacccatctatccagctatccagccagccttccatccatctatccatccagccaggcttccacttctccattcatccatccattcaaccatccatccacttactcagtgataatcatcgagtacctaccctgtgtacactgagccaggcaactgaaattcaagagaacaagcaggacagaaaaaactgctctcaagcaggcagcattttgatggaaggagaccagtaaagtaagcaatcaacaaataagatgatttaggctggtgctaaatctctgaaggaaataagcagtggaaggtgatagactttcgggtaggagtgggctcagggagggcctttgtgggggttagggggtgggcagcatctggggcaagacaggaaggaggaggagacctggtgataacattcaggaaggaagtgcaagtggaaaggcctggggcaggaaggggctcgaagagcccagaggaggcctatgtggctggtggcaatgggaagtagggggaggaggtcagaggggccggaccatgtggcaacctagctgggggaggcaggggtggtatccccagtgttacgagggctctccagggctactccagctgtgcgcggtttccacctctgcagctggtattccagtcaggggaatggggacaaggctgggatgggggatggggaccagggtcaagaacaaaacgtggtgctgttcactatgattaattaacccagcaccagagccccgagccgcggtgctaaaaatacctgcttccctctgagatgcggcagctgccacgcagcaacttttacccacgccgtttgtcataatctgacactgctaaggagtgtccacagggccgtgcgtctgcaagaatcggactcatccgcagtccaccagccagctggtcctcggaaaccatccacggcgctgtcctaccttcactctcctcccatccctgagcccagccaatgtgcctaccacctgccactgcctgccggttcgcagctcctcctggaaccgagcggaccacccccagaggtgggagccaaagcttcctcgagagcaggaggagcgcatcgctggatgccatgtttcacactctgcaactccgcaactcggattggagccatccatcagaggccctgccagcccagggcggcactttaattaaaatatgtaaaacatcctggtgggagtggagctgaagacacaggagcaggccttagacacaagctggcccttctccagcctgggagggctaggactgtgccaggaaggccctccgaagcagtctgggggagtggtgatgtctaatatgcaccagcagccactccactaagcacagaacttagccagggcaagaacatctgcttgaaagaaagccacaccaggtccccaggccagcacgatgaccctgagagcatgctgggaaggacttggcatcacatcagttgtcagtcttaggggtgggaatgttctattcccactctcaattttctaaaggacacattgtgacgctgatacctggacatttatacaaactctttagcaaatccatttccatttcccagacaaatcaactccccaagttcactatttgttcagactttgctttctatgttgagaggaagcgtggcagcagctgcattgtttagggcaggggtgagacaactcttttgcacggtttgcgcaatatcagaaaaaaatgtctaggccaattttttcaaaccaacttttaaaatatcatgagatgcaatatttaaaacttgttttaagcatcctttaaatttatttcccctattattgaaggactttgtgattgttactgaaacatcagaacctgaagaggcatggtatgctgcagtctcactctgcactttaggcctgcagcacattttctgggcaatgacatagattgtgtgtagcgctgagggatttggtgttggggaagcaaactggactctgagcccagccagagaccagggacaaagaaaagccccattaggagttcctggttctggtagagcaaggggtcgggggactgtttggaagcctgtctcggtggggacaagaggcattgctgcaggaggcgatgggtaccaagcacagcagggtgaggagagatgcccacgggctctaaaataagcctgcacacagacaagctactgctcccatcagcccgcacccctccaaccagcgacaacttcctcagggcagagccagagccactgtctgcatgtgggggtgtcaggctgaattacgtgagcttaaaaaccaaatcccctccttcctgggttacttaactgtctgcctggcaaggctgggagactactggtgacagacaccagggcctgcctggctgctccagacagagaagctttgatcacctggaaaactccagacaccaggcctcctaatgatgagtaatgagctcaaaccatccgaaagttaccctgcaccatgcacgggggacatgcacagcttccacagaagcctggtgcaggaagccagtgcccagtcatctagtgtcctaagacagagtttgaccctgactcccacgccacccaccccagccccacccagagtcttgccagtttgttgataaagcagggaagattgtaagctctgggcacttgcctgttccaagggttgatctggggtctaaaggccagaatttatctttatattcaagaatacagcctcctcatttgttcattcattcattcactcattcacatattcaacacacatttactgaatgactaagacaagccaggcacggtgctgaatgcttaggatagaagacactcaaatgaggcttctgtcctgaggggatttgccatctcccatggagatagcctgcaagtccagcatcacaagactctgtgataaggagcctgacagacttggctacagggtgttaagatagtccagaggaggggcctctaaattagagtgtcccttccttctggcagtgagaataggagcaggatgggatggaattcaaatattccgggtccttctagtctaggatcctaggcctaggtccttccaggctatttgagcctgtgagaatccccagtctcaagctgtacctgcatcacttcatctgggatttccttctgctctgatgttggctggaaatatgttaaccttgagttccccttttggcttcatggtaacttaagcccactgtgtcttaaactttgacatacattagaatcatcttgggagagtgttaaaatatcatttttaagttctgagtcccactccaaagagattctaattcagaaggccttgggagactgaaattagggtgatcaaccatctttttttttttaataggccaggtctcactatattacctaggctggtctcgaactcctgggctcaaacaatccttatgccttggcctcccaaagtgctgggattacaggcatgagccactgcacctagccgatcaaccatcttgatttacccagaaccaacatggtttcccagatatgagactttccattttaaaactgggacagtcccaggaaaactgaacaggttggtcaccctagctagggcagatgctgtccatccttgcccagtggcattcctttcttccttgaattatagattcccaattttgatgatgcagtaacatgtttaaggaagttgagccttcacccagacccaggtggtaaacctaggtgcattcagtaattccattccctgttgctattggtttacttaaggtaggcctgtgattcacttctggccgagaagttgttaaaagaaaacttatgaaaaaatattgtccctgaagtttagaagtgggactgagagggagggagaaggagagatgcctgctctttcttctgccttggatgcagttgtgtgataacatgatggttggaactgtggcagccattttgcaatcctgaggaaaacctaaggatgaaaattcagctgtgctaaggacgaacaactagaataaaaagagcctccactgtttaataataatatcattgatactctataccaaacctgaaattacctacctccaatataattgatatgtgattaaatgtctttcttgatcaaacaactgttgtctgatattctgttaattttctgccaaacacatcatgattattacaaaaggcctagaaatcaacatttttaataagatccccgaaatcattctgatgccctccattgagctagctaatccagtgattctcaaaatgtggtcctcagaccagcagcatcagcatcccctgggaacttgctggaaatgcacattctcaggcccccccagaccttctgaattagaaactctgggagtttctggggcccgtcagtctgtgttttaacaagccctccagatgattctgacaattgctaaatttgaagaatcgagctaatcaatacctgagactctctgagtagtatcagatctgagaaacttctggatggaacttttcatcttaacccaggtctcagttgtttctttatattgcttgggaaataaagcaggatgtcttctcaccttctgtgatttttctccttcctcctcaggcctttccccagttaatcttgcattagttggatgctttgaccagatttcctggcctgtgttatttaacagcatgtagtgacagggcagggaggcagttctttgcagtcaggcctggccagggcaggaggtaaacttggtcaacctagcagttaaggagagtgcatggcaatgcccctggcccagtaaccctgggtgagtgtttatacccttcaccaatactcaactcatcagactttgcattacatggcagccagcctgggaggagaagaggggaggcccaggcagcaacttctcttccttcctagggaagccttgccttggctggccttttatactccaggcagtcccctacttctcaacataatgagttactccaaaccccggtagtagtctaaaggcaaaaactgaaaaatagactccatgtggcaaggggaatccattctcagttcactaaaaaaggaagttacaggccggactcagtggctgctcatgcctgtaatcccaaaactttgggaggccaaggc[131 bp omitted]gaggcaggagaattgcttgaacccgggaggcggaggttgcggtgagccaagatcgcgccattgcactcctgcctgggcaacaagaacaaaactccatctcaaaaaaaaaaaaaaaaaaaaaggaaattataaaatccctaattacacctcttctttggaatatttcctcaaaaataattttcagtatttcacatgtgctcctgaatcttcctctttacaactgagcacactgtcaaaggatcatccaatgagcatcacattgtgaataatcatttattttttaaaaatatatgaattctcacccttaaagcattttctatgtgccagacacagggactttatgtgcatcatgttttgaagtcaagagccaccagcccaggcatgcctgccaaggctcacctttgtccgggtgaaattaggttgatgagtcctattacagcagctttattttgtccatctcccactcaaatgtatcagataaagccaaatgccataaaatattcaaacacgacccacttctgctgtgtgatgcaagctggcaagactgccaacaaggacccactggcctgcagtgcccctgggtagctgagagtgctgtccgtcagctaaggttctgaaaaccaaattcagctttcaatggttttgaagtgtgttatcagaaagtgagggctgtaccaaagttccgccttgcctctctagtcagggggtctgtggatctctgactcccactgccatgggtcttgtcttgggcgcacctctcagagggcccctccagccacccttgtttacagtctaccaacaagtaaggctgcttccaggagcagggccccctggtgctcaggtcttgctcacactcacaggcagacacacttccagctcttgggtggtcactggcccacacacttcagtggtcgagctaactcatgattcatacttttcttggccatcatcatttggtcattattataaccaaggcctagatgccaaatggtcccgctcgtacaatagttgagatacgcagtaaagtcagaaaaggccactaagcaggaaaaaccatttaaggctatgtgatggtcatgctgttaaggggaggcaatttggagagtcagcctgagagcaaggcaaaaagacccaaccactgccgagcctgactttggtttttcaaccaagccatgggaggcaagcaggctgtctccttgtctcctcccaccccctgaatgtcctctggtagccaggtagatgcccacctcatgcccttttacctctggtttctgtgctgggagcatctcagctgcttcctgccagctacagaaacacttttttgccataaagccagtcacttcccccgatcctagaccctgtcaacccatagaatgaggtaaaaagccccaaggaagacttttgagcctggctttatttttcttttctctttttttttttgagacagaatttcactcttgttgcccaggctggagtgcaatggtgcaatctcagctcaccgcaaccttcgcctcctggattcaagcaattctcctgcctcagcctcctgagtagctgggattacaggcatgtgccaccacgcctggctaattttgtatttttagtagagatggggtttcgtcatg[135 bp omitted]gcactggggttggggaggggtcaaagtgatcccataggttgaagatgacaggtcagcaggggttggccaaggctctggaggttgttacttttcagacacagtgttccggggagcagttaaaaggctggtctttgggagaggtgtaaactgtaaaatcctgctaggctggggttccagtcaaagcccatgagcaggcaacaagatgctcaggccccctcccgagacacaccacctccaggtaacaaagccttcaggaatcaatcaacggctgcaggatgcaccattctgtctgagcggctcccttttctccctctgctcttgccgcgggaggtcagagttcacatcaaatgtcattaatcttcttcctgggggctgggggcttattggacagtcctattaatcagaggcctgtcacacccacagcctggctgggtcgccattgtcctgttcctcacctatcatagaaagattagattatcagtgacaactgagacaccctttgagtcacaggaaagctggagattggggttgcttttattttttttatatatcctcctgatttgaggatgagctgtttattgtcttgtcacactgcatccttttcttcaaagaatcagctttaagaatccagtttgtcaaactggacaatcactggcaaatccaaaaaaaaaaaaccctcagtgactttatcaaaaaaggtaaaataaagcagaaggttttaaatgggtcctgaaaggattagaaaataagttgcatttgacaacaattaatctctgaaaagcaggagctttgtaaaaaggaacaggcagaaatgtgggttctggggttccacacaatggggatgtgtccattccctgtgcgcccgtccctcttccagagtggagtccagtggggacctggggctgcaaaggcatgagagaccgaccttccaagcttcctcctaactctctacccgccagtgtcaacagcagcagcaacaacaaaacagaacagaacgaaaacaccagggcagagcagcgcaaagacctcagccctccgggtctcccaattgtgtgacagactcagtcacccagcaggtactgggaccacctatagaggccctgtgggggtcataagtgaaggggacacttctaatccctttgaagcgtagagaccacggggagcacatgaaacacctaagtcaacttagatgggagcagggccttggagaacgtggactcacggggctacaaatggagatgcctcaagggcccaggaaagaatgtaaaccagggaagcaggctgtgggaaacccactgggagtggtgaggactccagcaagagagtgctccgcacgagcctgcctacaggggtgcaatgaccattccctctcaccgcactgtgggaaggggagctccaatcccccagatctttccggtttcatgagattccggagactcaggtttgtatgttaatactctgtattttaggctgggcacggtggctcacacctgtaatcccagcaccttgggaagccgaggtgggtggatcatgaggtcaggagttcaagaccagcctggccaacatagtgaaaccccatctctactaaaaatacaaaaaaaattagctgggcgtggttgcgggtgcctgtaatcccagctactcaggaggctgaggcaggagaacggcttgaacccgggaggcgaaggttgcagtgagatgagattgtgccattgcactccagcctgggcgacagagtgagactccatctcaaaaaaaacaaaaaaactccgtattttaatcgttggcaacatattcaatttttttttaatcactgaacatactaaataaaacccacaggcaggtccagtttggccccaggcctgggattggtgcttgttggaatccacctgcctcagtgccagtaaggaccaggaggcccagagaggctggtaactgcaaagatcacacatctggcagggccagtgtaagagtctggtttagactcccagcccagcgctctatgctccagatctgaatacagaaacacatatgtgaccaattagtattaatagataagctcattggagggcaataaaagggtaagaatgaagagaaaagccttgatttcacaccttcactgtgaaagcagagaagagaccaaattggacaaggcccaagtgattattgctgtacctttgatatcataggcatttaatttttctacctaaaaaactagccctgggtgcttctctgtgtgggtgctatagcagccggggcagggggacagggagtgctgctctgtggccctccagttatgctgtgggctgccagctctgtggaggtgtgttacccacttggccatagtcaaacactggagctggggagccaaactaccttttcaaatccactctctgccacttactaactgtgtgacttcagacaagttactcaacttctctgagctttagttttcttatttcagaaatggggataataatatctacctcagaagattgttgtgaagattaaaactagcatagaacgagtgagctgtgattgtgccactatactgtagcctggacaacagagcaagacccatctctaaaaaaataataatacataaaaataaataaaagtagcataaaacagagcctgtcccagagcaagtgttctataaattgttgttatataatataatcatgttttataccatcttcaaaggtgcctggtattgagacacaacattataggaaactgagtctgggaggaaccttagaaaccattcctagtttgattatctaagagaagggaaaaaaaagtgctggggtccaaagatggaaaatagtttaattt[131 bp omitted]acaacctctgcctcccaagctcaagcgattctcgtgcctcagccttccgagttgcttggactacagttgtgccaccacccctggctaatttttttgtattttagtagagatggggtttcaccatgttgcccagggtggtctcgaactcctgagctcagacaatctgcccgcctcagccttccaaagtgctggaattacaggcgatggtttcacttttaaccatttgcttagccgtatgccaaccattttgttttcctgctataacaccattggaaataaggaaagtttctactataaatatatttaaaagcaaagccatacaagccttcagactcccaaatattccagcaacgtcagcatagccaacactgcataacgtccactgctatgctcattaaagaaagatttgtgagatgactcagggctgtatttgtccactgcaagtgtgtgaccagcttcattttcaaaaatgattgttccccaaggtagtttgtgatcattagcgaaaagctgagcctcaaagcaatttcgatgttttgggaaagatgctgtatgtctttccatactggcttgataaattaaggtcaaaccagttgattatttgtgaaaattgaacacttgaacatgttaactgttgacaaaccttgacaggtatcatgtctgcctttattaggagattaattaaaggccactggaggtgctggcatggcgtgaaaagcctggatttggtgatagatagatttgggacagatcctgactccttacttggctctaaggccttaggctagtttcttaaactctctggatcaccatttatttgtgtgggaaatgggggtaataaaacctacttcatagactttgtgagaattaaacagaaaatgtctgtgctcaggaaatgcgagatccctcccaccccaccgcatcccctctagaaagatgaggcgagtgttcatctgtggatgggcattcactgagggactcttgtacggcgccccttgctgactgctgggatgaatcggctcaaagccaaatttaggttaatgtcaaatgagaggggagaacaatgaacgcatcattctttatgcttctgtttaggcttctgatctaaagaccaattgttgagttatttaaataagagtctgctccctctttggagatgatgtggaatctgaagttagagccctggctgagtttcagtttaaacacactatttttgatttactgacctttctgcaacctttcactatcctgaagcaatccgagaggggaagaattgtgaggtatctccctgagcaccaatgtggggtgaggtactggccctgagaggatattgagaaggcacatcccgtgcaggagacctctggcccatccttcagctctcgggaagttccccaagggtgggtgactgtctaccttgggagttcaaagatgaatgataccactgccaaataaaaactgagagagtagggggtctggagtctgaagcctgaactagagctaactatgacagccaacattcactgagcattcactctgagctaagcatgatgcttgaagcttttttttttttttttttttttttgagatggagtctctgttgctcaggctggagtgcagtgtcacaatctgggcttaccacaaactctgcttcccgggtttaagcaattctcctgcctcagcctcctgagtagctgggattacaggtgcacgccatcacgcccggctaatttttgtatttttagtagagacgaggtttcgccatgttggtcaggctggtcttaaactcctgacctcaggtgatccaccctccttggcctcccaaagtgctggcattataggcgtgagccactgcgcctggccaatgcttgaagctttaaaccctgtgttgcatccaagcttcctatcagccctatgaggtagatatgattactgtcatagctgaaaatactgagaagttacacttgttgcccaaaggccacatggctcccaccgagcagagtgggagctatgtacgagtgacacccactctcttacctgctggtcacacagtttccccaaacacattgattccttcagcgctcccacaagagaattccagcagccacgcctgcacctcatcccatcttagggcaaaactccccttctgcttggaaaagacacacgataggcaggggcttatgctttccaccaggggccctttctctgcacgttgggactccagaggtcacgtgggcctggggtttaaccctgcaatgccgacacatgcacgcatgcacacaaatacaaaaccacaagtggaattcctagtaccctgcccagcctgcaggggaggggcagtggcctctctttcttcttaccaccactccacccccagcccccctacaccggcatccactgatctgctccctgctgggctgttggagctaaggagggacaagtttgtctcccacccacttccagggctgtgtccttggcttcgatgaccttacaaaggctctcacctaaagggctatttaggtttaggtttaaggggcaagaagaaaagaaaagaagaatagctgcagcctaaaataagtattattggcaaccaggagagaaactcggggctcgtagaaccaaatgaagaatttgtaagctttcagccacctgaaattgtggcgctttcccccaccccatgcacttaataagagctgacagcctgcattgttctgccacgacaaggtacgctgcagcccagtgatagggcgagagcagcagggggacaaaggcagcacagccgaggaggggcagagcgaggggtgaaacataaagactgagggctggggggggcgactcctaatcaggagcctggcaagagaccccgggaacggcagcccactgacagtggagaccaggagctccagatggctttttgtctcaataaaataaaaaatgtaatctgacaggctctgggatgggactcagggaaacaaaagtcagcggagcagggagcgggagtgggccgggttaaaggtatcagagtctgagaaagacaaaaagaagtggctgtctctttgagcaattatgggctttgcaaatgacatttaattccagaggtgcatgccagggacaaagccagttgttttctggtcttggcaggggtagaggaattggaaatacactggacatttggcctcggaagaaaggtgataactttgccaattacccacgggtgtgggctctttgtgtccacactcttctccccaccccaagtcattaggggatgatataaagatacagggcttcctggtgcaatttaattgctcatagaccgaaaagtgatgagctccatcgaattgcacagacgtcctgtaggagaccagctgccgtattaatgtggcttctcagaggggaacacacccccacctgcttcaccaggagcacacagaagcccagggaaacagtggtccccctgtggcctctgatggggctgtcgctttttattaagtaatctctgcctttcagatcactgcatgttttcttcccaaaggtctttgttgctgtgtaggcccagcacacagcaggttcccaataaatattaaacagcggatgctagtgatgtctccagatgtcaccataggggacaaattgtcacccaggggatgaccccacactaggactatggtgtggtcactatggctgtatagcacaaaacctaaggcatgatgggttaggggttctgaggcagggaaatggggcaggagggttagtggatattacaaagagcctcttagacaaaaattataaagccagaagatgcatagttctggtgaggatgtagggaaacaggcactctcagataatggtagaggagaaggagtaaaggcttttccaaaaacaatgtatcaatagtgattaaaatgtaaatggccaggtgcagtggctcttgcctgtaatcccagcactttgaaaggctgaggtgggtggattgcttgagcccaggagttcgaggccagcctgggcaacatggtgaaatcttgtctctacaaaaaataaaaaaattaaccaggcatggtgatgtgcacctttagtcccagctgcttgggaggttgaggtgggaggatggcttgaacctggaaggtggaggatgcagtgagccaagatcacgccactgcactccagcctgggaaacagagtgacctcaacagatcacttgaggtcaggaggtcgagaccagcctggccaacatggtaaaactccatctctactaaaaatacaaaaattagtccagcgtggtggcgtgtacctgtaatcccagctactcgggtggctgaggcaggagaattgcctgaaacagagaggtggacgttgcagtgagccgagatcgcaccactgcactccagcctgggcaacaagagaggcagacagacagacagacagagcatgtgcatgattcataatttaaaaattaaaatacacattcaaaaaacatcaaagtgttttaagcatgaactttgaagtctgatcaggccatgagtcctggcttcatctctctcttggttatgatttcaggcaaagtcctctgagcttgtgtttcatggcagcatggttcgtaatagacctttgttgtgtgtctctgagctttggtttccccaactgtaggccagaggtagtaattgtttgtttgtttgtttgtttgtttgtttgtttgttttgagacggagtctagctttgtcacccaggctgggtgcagtggtgcaatctcggctcactgcaagctccacctcccgggttcacgccattctcctgcctcagcctcctgagtagcagggactacaggtgtccaccaccaa[175 bp omitted]agggttgttgaaagatttagatgagatatgcatagaaaagctcagtgcctgatataccctcagtgctcaataaatagcaccagttgatgtattatagaccgagtgactctaagtgtctctcaggagtgggaaaggaaggagagaaagcaagagaggaccccaaattacccaatgaacaaacatctcaaaaatatccaaggtcctgggatgatctgtaaactaaggacacaaaggaacttgctgactagtgtaacttcctctttgtctcttggcccaacaggtcttggtggattctcattacctccctgccttgtgaattcagataacagagacagaagtttgaattctgggcccgcagaccaatgtcagatgaggggtcccatcacccttaggtaatgatgaaagcacaggatgcatctttttccaaaagctgtccgcctggttggggcttctagggcccttggccatcaacgggatttgctctcattcagaatgacttcctgtccccaaaagaatgtttgttaggttagaaaagtgatcaccagggctatcaactgagaaagcagaaggagttgactcacatcgtttgtgcttattaaatacatgttaaaggattaagtgaaaactagaaaaagagaaagaaaagagattcacccctaagaaagccgggtgtgtccctggctgccctctcagaagggccgctcagagtgagctggaagagatgtgcatggcagccctttgggtatctattttattctgaggaaactgaacccagaaaaggtgagagttcttctagagatgcctagcaagtgagtggcccaggcagaatctgattttgagtttctagatcagtgctgtccaagagacatataaaaagaaccatatatgtgatttaaactcatggcatagccatattaaaaaagaaaatgagacaggtaaaataaattgtaacattatatttatttaatatatctaaaatactatttaacatataatctatattttaaaatataggctgggtactgtggctcatgcttgaggctgggagttcaagaccagcctgggcaacatagcgagatcttgtctcttaaaaagaaatttttttttacattagccagtgtggaaaaaaaaaggaaaaaaagaaacaaaaatgtaaaaaataaaataaaattagccaacgtggtggtgtgctcctatagtcccagctactttgcaggctaaggctgaaggatcaattgagcccagaagtttgaggttacagtgagctacgatggcacccactgcactagagcctgggcaaccaagtgagatgctattgagagagagagagagagagagattttccatctttgtgttttataataagtcttcaaaactctgctgtgtgtttcattcttccagcacatctcaacaagaaccaggcacattgcaagtgctcgctagctaacagctagtgctgcagctctaggttcctagccaagtcagtttccttcagatgtctggctgcaatgccagggtgcatgtgtgttggggccaggttgggtgggtgcaaactgggaggcacaggaaagaaattcaagatttggtaggtacaaggcacacttgtaaagacagctagcagcagggggccaggctaggtactgggtgggataggacagaactgagctttagaaattgatgggaatgagtcaaccaagagctgcggccacagccaggacagaaaaaactcaggaggggtggggcaggagaaacaattccatgagggttgaggctgtgtgagccccagagaaggcctggccacctcattgggcaggggcagcccccaaactctaacaaggagattcttcttcagccagaggacccagctctgtgagtccagggagctttgccaagaaggatactgctgtgtttgctgctcttcctgtttctaggcaccaccctacagcatgagtctttctttaccccaacccaaagcaaacagtgcaagcttgagacagcaatgcaaactgtaatgacatttaggagatgaccacctcatcacgattaggcatgagtgagccttggtacaaacctctgccaggcacttactagcatgtgacttagggaaagttactctctgagcttcagtttctcagctacaaaatggaggagctaatggtgccaaccctgttgccaacctcacagggtgactgggtgtgttgggggaaacagcgctccacacagtggagggctcgatgtgcacttgtgccgctacacacaggcagtccacagttccctgcacatctcatctgatgctggagcaggaggcagcctttccactcatctcactgagaaacagaaagaagggaggcctagtgctctgccagggccccacagctacaacccagcttcagggttcccactctagggcttgttccatgactaggttgaagacatttctggtaagtttgaaaggtgggattctttttactttctcttttcttctctctctctctctctctctcgtgtgtgtgtgtgtgtgtgtgtgtgtgtgtgtgtgtgtgtgtgttttgttttggcttttgtcgttgctgtttgtttgtgcttctaaccaagaggtaaggcagaactttaagaagctgatgtcttcccatcacttctgttggtccaagtcatcctcctgaaaacctaggtgtgggctgagcagctcaaaagccaagacagcagagaaagcacagagtggtgagggtcagatgtgtgaggggagagggtccacttgatggaaagaagggaaagagaggctgtgggtggggaggtttgccagatgcctggctgggctgacccaccccaggttcgggaggcctaaagagcagctgcatcttttgaggactgtataaggggtcagaagccccacctcttcctaccacccttgtacaggggagagcagggttctcatttctacagcgccccccaccgccggtggggcagggatgcaagcattatctcacctcttactctgtgtcctggaaacaacctgggaagtcatcttgtccaaacattttgttttgcaggagatgaaactgaggcagaaagcggctgagaaatattctcaaagtcacacagctagagtggctgagcttggttttatgcaactgatcggagaaggtagtggacagaggagaagaaaggaagagacagggccccagggcaagaaagaaagggattgacagggaacgccgctgcagggaagggacttcggggactgctcagcatgtccgcacaggaaaagaggcccaagcccttgttcggttcattccaaaaagtggattgacatcaagatgaatggccaattagggaagattgcagagacaatttacagagcaagttcgctcatattctggggctagatcagttgggggagactccaaaggcccgtcttcagtaaaaataatctgatgatcgctaattctatagccattagctttggagagactggtgtgagacggtgtaaagtgttaaaatgactctcttcctttgggggagaacttacagccttaattcagctggggttgcagtccatgggtcttaactgaaagagagaacatcagtcccaggcatcacaacagagaagcccaggagacccaaagaatcagcaatctgtttctccagtacttgaaggacagggtagacaatggtctttggaggaagtttaaagctttcagacgttgaggtggaccagacggcctctaagggtttctccctaccagaagagtatttgtttgtatggttcagttactaaatggacaccatgggctatccattcttcttgttcaagcatcatagaaccaaagccatgacctgccagtctagagctggctttcagcttggagcttgcttgagcacaggggaaggagagtggggtggggaatgggattccacaacctcttcccagcttcccagctctgatgtcctctctctcgcctgaggtgtgagggggtaatggctctgagcaaccctcacagccatacagcgagaggattaattaatgtggctaacatgctcggagatccctaaacgaggacgttagccaagggccaacattattagagggatgatggctattaggattacgctattgttatgatgtttgctttctcaacccttaaatcacactctacctcgccatcacttgcattttgtgtaattatagtttatataggtaacaaatggatatttctgcaagcctgggagagagccttctgcatacattaatttgcttgattagttctctatttagtatgctctgttcccccaaacccccctttcctgcccagcttcaacagaaaattaatgagttttaacaccttgtaaaagtgggttgtgctgtgggaataccttgagtgtactttgggttttaaatccacacattcagaggcttcctaaaggttatgcaaaggttaacaaacaattaatatgttgaatcagtgtgctaaatctgtttacccaatctttgcaatctaaaggccattagccatcagcctcaacacttacattgatctctctctttcctaacccacccccactctgttctctgaataatctgagtcaaaagcaagaaaaagttctgaatcgagagcagtaaatatctctggaaagtttggggtttcttgctacttaagcctcaaagctttgggaatcgtaatagacttgatcaagttgtcaaaaattttgagaatacaatgaaagatgggaagcatttccacctttttaacaatgagcaaaatgtgagttagtcttgtacatggatcccatcttgagttcatggctcttgtgctgattctctcccttgtttataggacaaaggggatggagaagtggtgggagataattctcatcttagtggactaattggaaagaggctttctactactctctaaggagaaaattcagcagagctattggggccagaatgtttctttccttaagagaaagaagagggtaaggaaatagccaaatgtaatccaggtggtaagattgcccccaggggtctcctagtccttcaaagaacttcattgctctccctcattttaggatgcctttgttcatgatgataatgatgatcatgactataatgaagaccatgaccttgatgagatcgtcaagatttatcatcagagtccagtgggcatgaggaaagcaacatgcagcagtccttcccagcctggccccttaagaggagctttcctgcccatgtgatccacctctatccttggctcaacagaaacaatctcccatgttgactgagaccccgtctccttagcctgttcccagacttgccaatcaccttgtctccctacctatgaccccttttgtgatgctcattcttgcacacagactgccagatttggccggtgaggtgattccttagacatgatctgacattggctctgggactcaactcataagccttgctcaggtcttctccctagtgtcagaggcaactcctatggagaacttcaaaggtggcatcattttcctcttcaaagtaaatattagcaaggactaagagctagctctctgtctgctttcggttttattggtaggtggggcccaaaaattgtaacaactagaaaagcacagtcactgaccaaccagaatggacacctgatggaaacaaccagaatagctgtgcccttgcatgccagtcaaatgtctgccctggttgtctggatatcaatgggaaggcattgttttgggttctatcaaagtgcactgctcatgaattttcttgattacatttggctttcgcattgtttgtgaattaagctttgtttaattttacttccacttacaatacattggtatgtgcaaatacctttgtttctaaaacttcgtggatgtgaatattaatggtgataatgaagacatgtgtcaggcagtgtcctaggagttttatgtgaattatctcattctgattctttagctgaggtacctacaattactactcccatttcatagatgaggaaaagcaagattaaagaggctgtggagtttgatcaaggtcacaaaactgaaaagtgatggaactagctctctttgatgccaagacacatgttctcctgcaagagaaaatattctacttaacaagatttaacacactgccttttatcccagagcaaatcagatgagtcatgtaaacccactggccttttttctgtacctggaaatgagggtatttgaagtataacttatattaacagatacgaaggtagaaaaatcatagctatctaacaatcagaaatagaaaaaaaaaagacagtatacctgcttcattgtacattatcagtcattaaaagtaaatttcacaaagagtttaacattcaagcgtgttaataatatcaaaataattgaatgaagcaggatataaaagtacatattaggcattttattattacaactacttaaaacatatccagaatgctaaagtatttataggtgaagggtactgatgttcattgctttgaaatgcactaaaaataagataattgtagaatctaagtagtgggtatggaatgttcactttatgtgtttgaaaattttcagaataaaatgttgaaaaatatgtgtagaaaaaaaagagagcgaaaggaaaaacttacggatgttaagaacagtcatctttggccaggcatggtggttcacgcctgtaatctcagcactttgggaggctgaggcaggtggatcgcctgaagtcaggagtttgagaccagcctggccaacatagtgaaaacccgtctctaataaaaacacacacacaaaaaaaaaaaaattagccgggcatggtcgcacacgccttagtcccagctactctgcaggctgaggcaggagaatcacttgaacccaggaagcagaggttgcagtgagccaagattgtgccactgcactccagcctgggtggcagagtggacttcatctcaaaaaaaaaaaaaaaaaaaaagagcagtcatctttatgtgatgggattatgggtgattatttttcctctttctaatcttctactgtttcagttacctattgttatatcaaaccatcccaacacatagagacttaaaactacatccattgattatttcttatactccgtttgtgagttggtgacttaaaacaacagaactatttattatttctcctgattccatttgctagcagggaggttcctcagcaggttttgtttgggctcaggcagttgctttcagctggagagtcaactggggtgggagatccaagtcaacctcccttacgccgttggtagttggtgcagaatgatggtgggcctttctctccatgtggtctttcatcccaggcttcttcatggatgtctgtctcagggcaatgttcctagaggagagcaaaggtggaagcagcaatgactcataagccctagcctcagaagttgcctagctttgctttctgcccctttctatgtggacaaagctggtctcaaagccaatgaaattgcaaggagtagacaagcagatgtctcctctggatgggaggagttgcaaagctgtattgcaaagggtcataatcctggattgaaatgaatctggagccataaaaaacctactacaactactgcgctagatgttaaaatgggattcttgtctcagtattactgagacaagacattatttctactgaaagtagaaaataatgggtgcagagtaaagcaggatgctgggccagcatggcagggtctccagttcagtcagcactcgaacatcattgattgttttaagagaaggctgtgaatgcatgaatcaggatgaagagattgagagtaaagatttctttaaagagggagagagttagttgttgaatacaaaggcaggggcacttagaaccactcaaaggatttgctctatgcccctagaatttgaaggatgcagggatgcaacctgactcatgctccaaaatcaaagacagagggccagctgggatggcctgcatggatgggcagccaagaggcagggcaggggcaggaagcactgcacttgttaggtttggtggtgcgaggatacaggtgcgcttcccgtggaccagacgtggacttcccctgagaaaaatgcctgcttataggtcagatatggatcccctagaagtgagtgctccctgctggagaagtgaggcgaccacaacagaggagctgactgctgtaaattagcgctcttatggagtcagctggaggaagcaccgtccaagaaaatcctcagccagtggggagatggtgtctccaaagaaccctaaagagcacacacaggagaaacacaccctcaggataccaggttacaactgttccagtcaaccaagactttgcttgccccctaagcctctcccccatcttcctcccacactggcccaggtggcagaagccgactactgagagggggcgcgaggaagaaaacagagaagaggcaactgcatacatgcctgtgcccacgggccaagctcagcaaggggagaagttataaactgcatgagagtttgatatgagactgggacttgacattttattacctgaaggagcaagactcttaattaatacctgggagtatccaaaaagcaagagaaagaaaaaatgaatccacagagccagtgtgcagggcaagtcgggggaagagtagagttgctttctgtctgcaccccaccaagccagcccaactcattcatttacctggttactttatattttccattttttatattaaactggcatgacttatagagagaatgaaaaataaactctgtttttaaaagggaagaaaagagctttgcactctacatttcagagttttaagattgatgagaaggcgtcctgacaagagtctgggttgaccaggagaggaaggaaatgaggcatacgcttgggaattgggaagtaggtttcttcaaggttttgtgtctaaataagtctacagacttcagcaaaaacaagttaaatagcaagctccgaagtacattagccaccctgaacaatgtgatccaggtaccttgccccagaaaacatagtctggcaattttagactggcatagccggcaattttagaatatgaaaggcttcttctagcataaacactttctttcttgcaaattcctgagaaatgaacactcaacctgctctcaggtcacacaagggagagacctcagggagagaattgtttacagcctgggtgagctctttacagacacctcaagagagtctagatcttctgacttcaagtcagggtctctgaggccatgtttcatatctaaggaaaaaaatagtttcattgttttaaagaaatgccaagctgaagatatgaggggaaaaaaatggataagctacaccatgccctttgaatcatttgggtgctttatgcatagatttttatccttaaaaatagagaggggaattaggttatgtttggaagggctgaaccatcagatctggattgcccagtggccagccccgggtgatgtctgcctattgattgtagagacactgggaaaaagatgtgaagactgatctaaagttaccagctctggagaggttgccagtgcctgataattggcacacatggaacgcaagtccatctgagaagagcaggctgggttcgcgctgactggggctccctggatggaaacaccccacctcaccccgacctgtgaaagagacacccaccttgctgctcattgcaaagggtggtctgtgctttgtggaacttcatgcccctcctgagcccaatgctcaattcaggaggcctcattcgcccgcttgatgctgatggttgaatgtggtctccttccatcctggattgcactctcaatttgcaaggataaagaagggagactttctgcaaagatgatgctcccattcatgataaggggcaacatgcatttcagcttcctgcagcccaggttggtgccagggtggaggtgggagctgatcatttgcaaggagacgcggagagatgtcgccacaccttcactgagaagcacatctgctgccagagtccgcttgtactgatagtggaacatggtcagctctctggctgtgatgtccccgccagcaggaggacatccaggcccctgatggatggggtggctctcttatttatcaagccatcagagtctgctacctaccagcacctcagcctcttctgttcctccttccactagttcttcgtggtcttgaacactgcttgtcccccaagatggctctcccttcttcctgagcacatggtgaaactacatttcccaacttcccttgcagttaggtgggggccatataactaagatgtcttcaaacaaatgtgagcggaaatgaggggtgccactgccaagcctgagccttctctacgttctctccctttcccagtggctggaaccacagcagctgagcctcaacctatagacaaaaccaaggcctgatggaaggaatttgagtgcctccaggactctgtggaacactcacctcaaactgctacacaacaaagaagtaaactctgtcttacataagctactcaattactatcgggtctattggttacagcagccaagcctgacttcttaccaatacccccactgcctcccgactaagaaggcagcagttctcaccccagggaggtagggcaagagaaaggtttcttagaggcagaaaccacaatatagagaagcattctgtctgaggcatcacctaggtgagaccagaggccaagaagacaaaccccaaaccgttctgatttctcctcctttcttaattataatcccatttgtaagccaaacccttcattctgtctctcttaatggctagtttctattctggtcctttttcaaccctattctcttttgcaatattcaggagttcaggcaatgaaggggtaaggctgttcccttagaacgccagtcccttctctatctttttaaatatttcagttgctcccaatccttatttttgcatttcgatttcctgtggtacagtaaatttatcttggtcactcaatcaagttctacctggctctctcccctcttatctctcctgctccgggctgactgaaaatacctacattatctttgcagccaatatgccgactggaaaaaaaatctacagattgtcttgatagggagtcatctgagggaaaacttggaaatgctggacttgtcaggacaaggatgaagtgtgaaacctcagtcagtgactttctttcaaggttaaccgcatggcgcaggcctcttccagaggcatttataaggactctcctcctctttgtttcagttcagaaagagaccttcctttgtatctttgtcctcccacggaataggtttactcctcaccacaccccctcacctggccgtggatcgccttgacccgtgagtccctgagccccaggcttcccacttgtgacaccaatgtgccatttgcaaattactgcaaatatcagtagagagctcccagcagaaccctacaacctaagtttgagagaaaagttctatctttgctgcctggaatcctgaggctctcgaatcagagaatctctcctttgactacgtttttccccctcctggagattagaacgtggggaggatggcaggtgaaaatctgttctttttaaagaggattgctggatccggaaccaaatctcagtggcaggccttactgaatgaccctaagccccctcagctttggcgacagatggactttgcatgcggctcactctctgggaaagtgcgtggatattgggccgccagctggcttcatttccaccaaaccatagcctcttgatgagtagcctcatcactcgggcactggccagtgggaaggagggagagtgcaggtccttgtcacgcaggctgactgatggtcggtcgacccacgtagatccaggccataaacaacagttacttgtttgaggtccacattgtattgtcttatctgttcagaagccacagataatttgaggtccctctcctcaaaggacacaaggccttcagcctcagctcttggctacatgtggccacccctctcaaagttggtaagaaaaacccttccctcctgccttagagctttttcttctcctttcagcccacttattcccctccctttgggttccacttctgttcactccttgggacatatctcagtcattttgtcccattgcatttgatgactctggacttagggatggggaataagatatgcgtttggatcctgccagatggattcctctttgcaaatttcttgtgtgttataagagcagctctggtttcttcttcgaggttttaacacttaggaattacatttatcttcctgtaagagagatctgatcgatgtggcctaaacaggataaagatttatttctctcttgtgttatagaaaaaaaagaaagagtccggaataaggcagcccagagctgatctgagagctcccaggatcctttttgcctctgttccaccatcctcagcacgtggcttccatccacaccatggcttcacagtggctgctggagctccagtcatcatgtttatattccaagcaggagaaaagagaaacagccaaagagtttccacttaattgactatatctaatggcaaaggagactggaaactagtttatcacctgggcatgttgtccaaggtcctgacactaaggaagaaaataatggatatcgggaaggcaactgagagtgtttgccacagaggcaatcagagtggtggggaggagtggaaacactgggcccagatgccatcctttgctccactaatcaccaggcgggagagtttggatgagttacttaatttctctgttcttctacgtcctcatctttatacttgcagtaaccacagtactgacctcacagtcagcaatactattattggttgattattagatggattatataggaagctacagtgttccggtgcatggtaagtgcttggtaaatgctagtttttgtcattcctctgcctatagtggcattattgatgccctcaactgttaccctgcctggtacacacccttgcccaaaggcagaattgcatttgggctcagctaagggagtagggaagaaaggttacagtgcatctctttaatttcccactcccagggcccaaaggactcaagtcactttggaatgtcccttccttgtcctctcccttttcccactagaaggacaaggagcagagaacacagaggaggtgatgcagaatgatgtctccatgtcctttctatccatcccaagccccaagttcgtattgaaaatgccaggccgggtgtgatggctcaaacctgtaatctcagctgaggtgggaggattgcttgggcccaggagtttgagaccagcctgggcaatatagtgagaccccatctcttaaaaaaaaaaaaaagaaagaaagaaacatgccagccctcttactgtagtcattgccaaggataactgtgcataaccctggtccaggggcttggggaatccacttggcccttgccccagggaatttacagtctagaacagggatcggcaaactatagcctgctggcaaaatctagcctgacagctatttttgtagataaagttttagtggaaaatggtcacattcaactgtttatatattgtctatggctgctgttacattacaacagcagagttttgtactgcagtagacatggcccacaaagccaaaattcttactctctggctcttcacgaagaaagtctgccaatttctgttctagaaggagaaaaagaacacacgtttaaaaatatcaacaggggaacataatcaaacagtagattggatgacatatgtaaaggtaaagtgaagagcctggaagaactgaaagcgacagctagcagcgcgtatgtacagagagaagaggagtggaacagaatgaggatatgggcaaagctaaccttggcctgatctgttatgctttgttttataaggatagtagacttaggtagttaaaaactaatttttaaaagagtatattgattgctggaaagactgtgacatgtttaacactcttatagattcctaataaagtataaattaatataacccttttggaaagtaatttggaaaaatgtattgagagccttaaacatgttcctactcctggcctcataatttcacttctgggaatccatcctaacgttataaactaaaatgtcaaaaatctttatgcacaaatatatcaattgtgatatgactgctagtagcaaaaagctagaaccacttagatggttagttacatagaagttaaataaattatgaggccatgtacagtggctcatgcctataatcccagcacttttggaggccaaagcgggtggattgcttaagaccaggagttcgagaccagcctggccaacatggcaaaactccatctctacaaaaaaaaaaaaaaaaaatcaaccgggcatcagccgggcatggtagcacatgcctgtaagtcccagtcactcaggaggttgagataggaggatgattgagcccaggaggtggagattgtaatgagctgagtttgccccactgcactccagcatgagctactcaggaggctgaggtgggaggatgattgagcccaggaggtggagattatagtgagccgagtttgccccactgcactccagcatgggcaacagagtgagaccctatctcaaaaaatgaaataaaataaaaagaaattatgatacttccatatgatatatagtgactaaaatgatgttcacaaagaatttataaataatttggggaaatgctaagtgaataaataggatacaaaatcatatgtagtttcatcagagttgtattaaaaagaaatattacaaccagaggatacccaaatgtcacaaaagttatcttcagaggagtgtatgatttatgtttttctttgttatattcatatatattttttgttctagaacatcttggttttattttcatgagggggaacctgcatatcatcttgaattctaggggttttcaaagagtgctgtcatgaactgaacgttcctatgttgaaatcctaacctccagtgtgatggtagcaggaggtggggcatttgggaggtgctgaggtcatgagggtagagctctcatgaatgggattagtgcccttagaaaagaggccccagagagttccatcatcttttctccacatgaggactcagtgagaacatagccatctctcaaccaggaagcagaccttcatgaggcaccaaatctgccagggccttgaccttgaacttcccggcctccagaactgtgagaaataaatttctgttgtttataaaccacccaatctaaggtatagcagcccaaacagactaagacaggtgccaagttgatcagagattccgtgaaaacagaaaagagaaggtgggtgttaatcacctcatttctatagggtcaggaaagcaaatagagggaaaggagagatttacactccattccaccaaactgacaggccagaagcatgctctgtggacacagccccaccgcatgctccttcaccgtgctccatcctccactgctgagagcctggtgggtaggggcttaaagggccagcctctccccactccacagagtgaggtttcagcttcttccaggagcaggggtccagctcttcaagagagagggagaggagagagggtcaaggatgaacagggtccaggctcggtgacttatgcctgtaatcccagcactttggggggctgaggtgggcagatcacttgaggtcaggagtttgagaccagcctggccaatatggtgaaaccctgcctctactaaaaatactaaaaatgcaaaaattagctgggtgtggtggtgggcacctgtaattccagctactcgggatgttgaggcaggagaatcacttgaacccggaaggcagatgttgcagtgaaccaagatagtgccactgtactccagccttgtgagactctgtcaaaataaataaataaataaaaagctgaacgggggaggggggcatccattttctctcaagggacttttgagtcactgggatccctgcctcctgaaaattttcctctggttcagaccttcagttcaattctgaaatctgcagcaaccctatttgtttgggcttctcttcccttatcctaaaaaaaagacaagaaataatatcaaagctgggtcctcaatccatgcagtatgttaggaaggctccaagagatgaggtctgcttgaaggcgggaaatttggcatctatatgggaaaccctttggaaaacagctacagacccttctgcaaatctcagcccctcggctttggggtatgaaagaacaggccttgaattctagcttcgccatgcctgacctggatgtgtgacctcaggaaagatacctacattctctgagccccatttgattcatttgtaggttagggtaggggatggccatccaataagtgttgctaaaaaataccagaaataatttttgtaatgtacactgtgcaataattggcacattataggttctcataaaaggcatttttacttatcaaattacattttctgagcaccctgatgacgggagggcagtaaactggaatcaggcactaatctagaaaggatggttagtctgtatgttttccaaagcaaaaagaatcatgagttctatttataggctctgatgcattcagccttcaagaagcaactcaaacccaggcctccatcccatcagcaccatccctgccccctgccccagtccagtgttcctgaccacaaaagcctgaagcacgccctctctcccctagacaaggggagcaatcactgtcagaaccactcacttgataattaatcacaaagggacctgtgacatctcttcttctgtagtcgaaactgatatgttcactgttcccagatactgaactccccacgtatttggatctcgtctcttcaactagattacaagtcccttgagggtgaggtgcttcctttacttttcgcattcgataggagattgatacttgtcgcactttgaatttttgtgtttgtttagatctagtccacaggaagtacagctacacttggcaggcgcagggtggaatagctgtagttctaaacagatcaggacagctctgggactggctgcttccaagagggaaaggcaaaatgcaaagaactcacagcaggagggggctttctgtgcccctcaatgtgtggctctaaccacatcagtgggtggagggcaacgcgatgctgtcaaatcagggaccaggtttgtgtctggggtgatgccaggacactggttgcttcctgccacccacagctgcatctgggagtcctgggcagcagccacctggggaagccagacttaatcaggaagtgtgggggctgtcagcaggggcaaggggccacgcagccaagccaattctggaatcttttggaaagaggaaacatccggctcctcctccctcacatctctgcttctgggtctgggcttgtgggtcccagcttgggctaaggagggccatgctccgggtgggagcagctgtgtccccaccccctccttcccatgcgacttgaggccctctggtcaggactggagctgtcacatgcagccagcagctgtggtggcgccaggctcaggcacccaccacatggcttcctttttttttctgagatggagtcgcccaggctggagtgcagcggtgtgatcttggctcactgcaacctccgcctcctggattcaagtgattctcctgcctcagtctcccgagtagctgggattacaggcacgcaccaccctgccctgctaacttttatatttttagtagagacggggttt[132 bp omitted]ctggccagctgtgcctcccccgctaccagggcagcaaatggccagtggtgtcctcgcagaaggggcggaggagggcggggaaggattaatgccacctgcttccctcctcgccctgtttcatgtgacatgcacttcaaagccacaggacactgctgcccttctttgttgcatccctgcagatacgggaatctgattttcccaactaggaatttgtatttcagcggttctagtgcttgggatcttagaaagaagcttgctcagaaagaacttaggaaacaaagcgatgtttgagtgcctgccccgcagcggatctacccgttccaggagctgagcgagacacctaccacctgccagacccagggcatagccgagggccttagcctgctgtccccaccgggtccccactattttaacaccaacaccctgaaaccatgggccaccaccccccacctctaccccgcccctaccccacgaccctttcaccagagcagaggtttttcacaaatctccatagagatagctttgctagcagcagcagcagcagcaaactctgatgcagaatgaggaaggggagagcctgggggtgtgggtggcgggggagggagtcgtcgcagtccgggagccaggctctcggcgcgttgggtccgcctctcgtgacagcagagcgccccctgctgcccgagcccgggtggtgtcgcacagccaggtcggggagggggcggagctgcttcctggcacagcgggtcgcccagacgggcgggaagaggatgcagtctctcggtactgaagtctgcctgcagtggccaaggtctgccgcagcccctctgggttgggggcagttctctagggcgtcctggttaggtcaacgggggctggttgggaacctggctctaccatgcaccgcctgccccgctatggacatatggtttaacctctgaagcttctgtttcttcattaaattgagatcatcaattgtacctgcatcacagtgatgttttacagagataattcatgtaaagcacatcctaaggtttcaataatagtagcttattattattgattcagctgacacctctacaactaagtgatagaacaactgagagggtctggtagacaaaagtcaggggatttgttttttcaaagcattttcatcattaaatggatctgatctggtcgcatgggcacatttgagggacatgcaactttgcctaaaggggaaataaatgccagagatattcacagaaacatcaaccacaaacaattactgaacacattgatcaatgctctaagctgtacaataaagaaaagggaggaaagttatgtttagggcagctcagccctgcattctcaaatcttccctcttcactggatatctattaactacaaacatgctgaaacatctcccatataagaaagcaaacaaacaaaaaaactccttgcaccctatctccctccagctagccccttacaccggatgtctttcctcccctagagggccaaatttcttgaaacacgctcagtgactcccttcctgtcctgttagctcttgaacccacttaatcaactgtctgtgcccacttcaccttccctgcccttgtcaaaaacaccatgacccacaccgttcatcccgtggctcattctcaggcctctcccctccacccatcagcgacactgacgtagttgatgggcagctccttcctgatccttgaagcacttcttccttcgactcacccctggttctcctcctacctctctggccagtccttctctgtcacctttgactggaagctcctcttctcaacccccaaacatcaggacactctggctcggtgtccagcctctgctgtatctgtgcgtcctctcagccttatgccttaactgctgcacaacgacgctgtccacatgcatatctctagctgagcacctctcctgaactccacatttgcatatcccgcagcctcttcaccatctgcacttcggtgccccatcgacatctaacttaacatgtccaaacagagctcttgattcctctctcctccctgcctttcccatcgttttttttcttcactggtttctcctgagaaatctttcccatcctaatatgggtaacttcacagttctggttgctcaggtcaaacagcgtgctcatccttatgtgtctctctttcacaccttccaccaatccatcagcaaattcaatcagtttgaccttcaagatgtgtctagaatctgcccacttcttgaaatctccactgctacccccagtcccagccacagccatctcctggctgggctcccagctttcaccctgttcctctgaggacatttccacatagcagagtcttttatgacaacagctgaatcgtgtcactccttggcttaaactctccaaagctttctcttctcactaagagaagaggatgcagggtccttgcacggactccagggccacatgtggtcttgcccctggcttcttctccaaccttatctcctaccctccccgtgctcacgtcactccagccgcactggcctccttgccattggtggagtgtgctgagcatgattccgcctgaggtctttgtccttactgctctcttttcctgtaacactccgaccccagacaaccacagggctccttccctcactccattcaatctgtgctcattgtagtagcaaggccttccctgaccactctctataagatagaaaccccaacctttccccttactgtgtgtattttttcttcatagcatgtatcatcacttgacatagtataagtttcatagttattttttgtctcccccaactagattgtaagctccatgagaacaggaactttgttttgttcactgctgtatccccacttcctagtacagtgcctggc[131 bp omitted]atagtgaaacccagtctctactaaaaatacaaaaattagccgagtgtgatggtacgcgcctgtaatcccagctactcgggaggctgaggcaggataatcgcttgaacctgggaggcagagattgcagtgagccgagattgtgccactgcactccagtctgggcgacaaagcaagactctgcctcaaaaaaaaaaaaaaaagtgtgactacaggaatgaattagtccatactgacaaccccccactgcctggctaggaggcaaaagatccaagggcagcttcagcactgacttcagagacatattcatgactctgtgctttgtctttcaccaataacccattagataggcctataactagaacataagcaataatgctttagcattctcggtctcaaaaatattatgtaaaacctttaaaggttgtgagataacatgatatcttccacttctgggctagacaatcagatttcatttttttccatcataggaacagagacaaacttgtgaaatcattcaccccagattttctctctgttatatcatgtcatcacttctatcactcattgttctagtgatacattcaaaataatgaacattcagggaaatgccggctgggtccaggatggccctggctgtttttaatcacactcttaaataaaagcagaaatgcacctgaccttgtagcatcttcgggagaaagagggtcaatgcttctaaatctaaatctcccaacttatttcacctaaagatcaattgtagaattgtgtgcactgcaagaaagaccaagaatatactcaaaaattgacagaaggacagtggcttagaaatccactcttttccacaaattgcaccctcccagagtctatcaacttcccagccatatgcaatatcactttcctgtgttcatcttgcctagatggggatgcctttgggtgagtgagacatctccaaataagtaaaagctgtttcaactggctcccacttctgtttattatggagtaccgtgagctgccaccaagcagaagatcccgctcctgatattcatggtacttttaacttaccaaaatcatgtcatgtattattaatctctatgggaataggtgcaaagcactgacatcttccagcaaccccttgatccacttggttctatccctagcctctcatgctagttcaccctttttaagtctatgttctgatttacttcttcttggtgctcttgggccctgggaatgcaaagtcctttctctttgggtccaaggtttacccctcagccttcaaatgttaattattctccttgaatatgacctcattctttcattcaacaaatatttggactggataaactgatataaattcacaattaccattagtgtgctaagtactaaatagagatatttataaggtgccaaggaagcctagagcaagattactgggtggggaaagaatctagaagatggattagggttgggggctgaaggcggctcaccagttgggaagtcactgcaatagcccaggcaagacactggtagagcagctgtgagtggtggggatggtgctggggatggactggaccagggaaattacagaagtaactggataagagggagaggggcaagtccagggatactcccagctttcgggtgcagataactagacatccacatccccagaaagattgtttgccacccctttctcctttctcttccttaccttcaggatccagcccatgtaattgtccccagtatagtcacagctccaacctaccagtctcatcacacaccctctctgtgactcagtttcctcattcataaatggaagcaataatagtcatttccaagtaagttcgcagtgatgaataaacagttaatctgtgtaaagtgttttggatagtatctgagacataataagcactcaaaaaaatgttagctatggtcatcatcattaaggtcatcatttcttcccaaccgcccatcctgaaccaccgtgcttctttcccacctcaaggagctatccgtgtgttcttggctcctctgctctaggtctatgcacagtctaacatctttccaagatttattttttagattcccaaatttctgctgtggaggaactctttgctgcaagactttaacttgttctcaaagtaagctgaattaaacatggagatgcctccctcggcacccccagcactccgcttctgctgtatccacagccgaatgaaacaatataatcaggacagaaactccattccttgggtgggtgctgccaaccacctgcctggctccagttgaaacctgcttgtttctttttccactctctaaatgctcacagatgtctgtctgttttcctctaatacttgacttccaaaagatgggggatgattggctacttgtaaatatgttaatctctctttttctttctctcctaatatcaaaagaagcagggggtgcatgaggggatctttttctcctgggtggagttaaagttggcaaaacctgccaacaactttgttgcatattgaagggggctaggaatagtgcattccttgaccagagaatttgactgagctcttaaccccttagcgttaatcgctccacctccactagggctttgagaagcattagaaggaccccaaaccagggagtggccaacatgaccacagactagtaggaaccagacagggtctagctgggagaattggtttctgaattgctacaggacattcagattagggaactgttcccaggaggaaaaggcaggaatgaacaccagtggtccaagctgagaatgggagaacgaggacatactctaagcatgtcctccaccacaagcctgctttacagcatctttcagaaagggctgaaggctttacataggagaagatactgtctctggtgtcagaacctttaaagtttgtatctgagcaggaaaatatttactatagaaggtgtggtacatggaacaatgtcgttcaaaacttaaagactcaaatctgaactatcgtgggagtgtaagtttatgcaaaatctgtgaaaagcaaattggccagatgagtcaagagccataaaaatatccattatctttgactcagaactcccacttctgcattcgatcctaaggaaatcactccaaatgcagaaaaagatgtctgctatggggcaaaaatggaaacatcccatctgcccatttataggggaagagtgaaaaaaatcaggaggagctccttgagaaaccagctggcaacatgtctcttacgaagagtacatgaaaacatggagacattttataacaaggctggaaacagcagttacactaacatttgtatatgctagaatttcaaccattggctgaagatgatggagacagtgcatttcaaaagaaaatgaacagaatgaaatagacgaaaatggatttatgctcgtgtttcggtgatagaactatgactagattttttttttattttccccttcttttgtatttttcaagagttctttgatgaggtgttttacttttaaaatggaaaataagtatgggtcttcaaattagaaaatccatcaagagtttttgatctaacctcaaaatgaaaagtttttcatggaagtcatttttccagaatttatttcattccactgaaaagtctattggcttggaagttctggatgtgagggcgatctggctgcaacgtctgtcaccccattgatcgtcagggttgattcggctgatctggctggctaggtgggtgtccacttcctccctcagcactccatgtgcgtccctccggaggctgaagaggatgaccatccccgacagaggaggaccgatcttcggtcaagggcatatgagtagctgtgctcccttgctagaacctccaaacaagctctcaggttatgccactggaagtatattaacacatctttgctccctgaaaatgcccatgcttcctgagctttcatctccaaacaggagggatattgagtgggggcagaagcaattatggtatatacagccaactacagactgctgtttacacaggaacaccccaagaaagtcaggataaagccttgcaccagatgacctgatttacctaaaatactgcctctctttatgggcagtcccaggcagatctttcaggagtacccgtcttttgtgttgcagacacagatatgagaggacccagaaacggaggaggaataagagtttgagtatgagaacccatttccttcaagcctgccaaaacagtccagaacctgtgtgctgtgaactgtggaatgagccagggccactcagaagtcctccccacccaccagcaagccctgcaaaaaggagaaacaactaatcacagtgacttgtgtgcagcatcctgaatcctaaagacagagctacttcagggaatacctgggtggataccaggcgggaagtccaagcagcaccacctgcgcctctgtcccaaagggctgacaccccctgtaaaggcagaatcagcagatctcccaggagctccagagtgagtgagctagggggtgggggattgttgcctaaagggcattttttttttttttgcatactgcttgagagagcctgttagactcacctcttaattgcgactattctgtttgtgaaacagaaagagattggtagataaatgcataaggaaacaaacaaaaggaccaccatcagaagcccccctattttatcagagacagctctggtttggttagcctccaggcaacttcttggagggtcctgcatctttgaaacctctaacttccttctcttccacacccctccccatcctgaacacccatctcactcctggctgtttatctttttttcagccaatcaaagagctaagcaattttttcacttttataaggaaaatttaagagtataataaaccccatgtacccttgtcccagattcaataattttcaaatcttgtttcatcagcattcccacccactttcttcttctccaccaattatttggaagtaaatgccaaacattacgttattttatccataaagagttcactatatataaatctaaaagatgaagtctttttaaaaacagtctcggctgggcacggtggctcatgcctgtaatcccagcacttcgggaggccgaggcaagtggatcacctgaggtcaggagtttgagaccagcctggccaacatagtgaaaccccgtttctactaagaagaaaaagttagccaggcatggtggcgggcacctgtaatcccagctacttgggaggctgaggcaggagaatctcttgaacctgggaagtggaggttgtggtgagccgagatctcgccactgcactgcagcctgggtgacagagacagactccacctcagtaaataaataaataaataaataaataaaaacattctcactataccatgttcaacttcaacaacttaacaataattctttccttttttttttcttttttttttttaagaacattctggattctgggatctgaacccgactccctttctatcagctgaagggactggaggccattgcaggtcctttcggaatggcactcacccatctctcaggaccaactgacccatgttcaactgctgttcacaataataatcctttaatatcatcaagtatccaggcagtgtttaacttcttctgtttgtctcataaattgttttgtctgtttatctgagtcaggatccaaataaggtccttataattgtgattggttttgtatcttaaaacataaagaaacttaaaaagagccgagttttaaaaccacaaaatccaaattcaggtcaggtgacatttgtttcattctcattcaacagatatttatcaaggacttcaaatgcaccaggcctgtgccctacgctgggatacagtgatgaccaagagcatacctagaacctgtgccatagagggaatctggtgagaaaagcagacattgatcagatgatcacaaagtaaatgggacatctaaaatattgaaaagcatcatgaaggaaggtgctatagggaccaagaacatggagcttacataacttttttttgtttttttttatttttgagacagagtctcactctgtcacccaggctggagtgcagtggtgcgatctcagctcactgcgaactccaccttccggtctcaagcgattctcctgcctcagcctcccaagtagctgggattacaggcgcctgccaccatgcccggctaattcttgtatttttagtagagatggggtttcaccacattggccaagctggtcttaaactcctgacctgatccacccacctcagcctcccaaagtgttgggattacaggcgtgagccaccatgccttgccgaacttacataaccctaaaagacagaattaggaccaacagttaaagtgctggggaatccaattagggcacagtagagggaagaattcaaaagttactgagtatttcagcaagcaagaatatatgactcaggttggtcacagtggctcacatctgcaatcccagcactttgggaggccgagacaggtggatcacctggggtcaggagtttgagcctagcttggccaacatggtgaaacaccatctctactaaaaatacaaaaattagctgggcatggtagcgggcacctgtagtcccagctactcgagaagctgaggcaggagaatcgctttaacccgggaagcggagattacagtgagcgaagatcatgccactgcactccagcctgggtgacagagcaagactttgtctcaaaaaaaaggaaaagaaaaaagaatatatgactcataatgaagagaaaaatcaagcatcagaaacatatcctgaaatgacacagatgatagaattagtagacagtgtgttaaaagtagctattacttcacatgttcaagaaggtagaggaaaatgattatgataagagtaggcaaggaaatttttttaaaaagaaccaagtcaaacttctaaagataaaaaaaaattcatctgaaatgaaaaatactctggataggattgccaacagattagacactgaagaaaaaagattagtaaacttgaagatacagcaacaaatacaatccaaagtgaaacagagggaaaaaagaccccaaatattgaactgcgtatcaatgagctgtgacacaacattaaacatatgtgtaactggaatcgcaaaatgaaaggagagagggaggacgaaaaaatatgaagaaatagtgaccaaaatctttccaaatttgattaaaaagttatgaacccacacatacaaggagctcaatgaactccatgaacaaaaaacatgaagaaaactgcatcaagccacatcttgattacattacttaaaatcagttataaagtcttgaaagcaactggagaaaaaaaaagagacattgcagaggaacaattataagaatgacagcaaactttttatcataaacaatgcaaggctgggcacagtggctcacacctgtaatctcagcactttgggaggccaaggtggctggatgacttgaggtcaggagtttgagactagcctggccaacatggcagaacctcatctctactaaaaatacaaaaattagtcaggcatgatggcacacgcatgtaatcccagctacttggatggctgagccatgagaatcacccaaactcaggaggcagagtttgcagtgggccaaaatcacaccattgcacaccagcctgggaggcagagtgagactgtgtctcataaaaaaaaaaaaaatagaaatgagaagataatggagtgacatctttaaggtactagagggaaacacaccataaaattctatacacagagaaaatctttcagaaacaaaaactaaatacagaccttttcagccacaaaatcttagaaaattgataaccagtaaaccaccagtacgatgaaatgttaaaagaggtccttaaggcagaatgagaattataccaaaggaaaaatctgcatttacataaaggaatgaagaacaccagaaatagtacatatgtggagaagtacaaaagacttcttttcttttttttttttttagacagagtcttgctctgtcgcctaggctggaatgcagtggcgcgatcttggctcaccgcaagctccgcctcccgggttcacgccattctcctgcctcagcctcccgagtagctgggactacaggcgcccgccaccacacccggctaattttttgtagtttttttagtagagacggggtttcaccatgttagccaggatggtctcgatctcctgatcttgtgatcctcccacctcagcctcccaaagtgctaggattacaggcgtgagccaccgcgcccagccaaaaggcttattttcttattacttaaaccaccttaagaggtaattgatggtttaaacaaaagtaacctggcatggtggagtttctaatctatgtagaagtaaaatgtatgacaactatagcacaaaggccagaaggggggaaaggaaagtacagtgttgtaaggttcttatactatacgtgaagtgttataatatttcttgaaggtatatgtgataagttaatgcgcattataaatcctaaagccatcactaaaagaacaaaacaaagcagttgagctaataagtcaataaaggtgataaaataaaatcataaaaagaatactcaatacaaaagaaagcagtaaaagaggagaaagggaacaaagactagatggcagaaatagaaaacaaatagtaaaatggtacattgaaatccagccacattggctgggcatggtggctcacacctgtaatctcagcactttgggaagccaaggagggtggatcacctgaggtcaggagatcgagaccagcctggccaacatggtgaagccctgtctctactaaaattacaaaaaaaaaaaaaaaaaaattagctgggcgtggtggctcacgccagtaatcccagctactcaggaggctgaggcaggataatcgcttgaacccgggaggtggaggctgcagtgagctgagattgcgccattgcactccagcctgggccacaagagtaaaactccgtctccaaaaaaaaaaaaaaagataaaaataaatccaaccacatcaatagacacctccaattaaaaggcagagattgtcagattagataagaaagcaagacacgacaatatgctcttactaggaaactactttaaatatgaagaacaaacgggttaaaagtaaaaaaatgaaaaaaggtataccttcctaacactaagcaaaagaaagcaggagttgatgtaaaatatcagacaaagcagatttcagaggagaaatacaaccagggataagaaaaaaagttattttatagctgtcaattcattaaaagaacatagcaatcataaacatttatacatctagaaatacagcttcagaatacacacagcataatgtgagtattctcagacaacacaactgaatacatagaaaacccaaagggatataaagaaaaattattagaattaatgagtaatttatcaaggtcactggatacaaagtcaatatacaaaagtcaaatgcatttctatatgcacaagcaaatagaaaataaaactgtttaatgacacaatttacagtagtataaaaaatcaaatacctataaataaatcaacaaaatagtgcaagactcttacactgaaaacaaagagaaatttaaaatgacctaaataagtagagaattataccatgttcttggattggaaggctccatactgtaaagcagtcatttttcccccagaagatctatacatctaatccaatcccaatcaaaatttcagcaattgttttatgtgtgaacattaacaagctgattctaaaatgtatgtggaaatgcaaaagcccaagaatggccatgccaattttgaagaaaaacaaaactggaggaattacgctatcagttactaagacctactttaaagttaaagcaattgtaacagtgtggtgttgagcagcggaacagattagaggttccagaaacagactcgtaaatatacaattgatcacctgatttataacaaagatggtactgcagtgctgtggagaaagaaataccttttcaaaaactggtgctgggtctacagagaaaaaagtgaactttgactcctcctgatacatatatacaaaatatagatctaaatgtgaaaagtaaaaaaataaagcttctgaaaggaaacagagaacagtaggtaaaaaagaaattttttaaagaatgtgagaagcactaagtaggacatgtcagcttaacatgagctaatactgttaagattacaaaaacaggccgggcgtggtggctcatacctgtaatcccagcactttgggaggtcaaggtgggtggatcgcttaggtccaggagttcaagaccagcctggtcaacatggtgaaactccatctctactaaaaataaaaaattagccaggtgtggtggcgcacacctgtgaatcccagctactcaggaagctgaggcacaagaattgcttgaacccaggaggcagaggttgcagtgagccaagattacaccactgcactccagcctgggtgacacagcaagactctgtctcaaaaaaaaaaaaaagaaaaaagaaaagaaaaaaatttttttaaagattacaaaaacaaacaagcaaacaaaaaatcctgaatgtgatctaactgacattaatagaaatgtaaaatccagatgaaaggattctgtattctgtattcttcaatggctagttgggtgttatgttgtgctctcagcataggaataaaaaaaattatcgaagtataggatacatacagaaaaatgcacaaatcttaagtatacatcttgataaattttcagaaatcgtgcacacgtgtctaccagcacccatatcaagaaacagaacatggccagcacctcagatgccctttcacagagtcttccagtcactcccctgcccttctagattaaccattatgctgaattctaacactataggttagtttttcctgtgttatatatatagctgcaatcttagagtacatacctttttgtgtctggcttctttcatttgacattatgtctatgagacttatatttttatgtacagttatagtttactcattttcattatgggatagtgttccattccacaatttattaatccattctactattgacggactttgtgtggctttccagtttggagttaatatgaatagtgctgcacattcttgtacatgtctcttaatgtgctttgacagctttgtcaaaaatcaattggctttgtacgcagtggtctagttctgggctttccactgtgtgtcattgatctatacagctatctttacaccagtaccaaccacactgtcttgattactgtagctgtataataaggccttaacatcaggtaaataagtcttccagttttattcattttcaaagttgttttggctattgtaagtccattgaattttcatacaaattttagaaccagcttgccaatttctacaaaaatgtctgctgagattttaattgggattgtattgaatctatagatcaatctggacagaactgacatcctgacaatgttaagttttctgatccatgaacagtgtattactctgctcaggctgccataacaata[139 bp omitted]gaaaccctgtctctactaaaaatacaaaaattagccaggtgtggtggcacacacctctaatcccagctacttgggaggctgaggcaggagaatcgcttgaacctggaaggcagaggttacagtgagcccagatcgcaccattgtactccagcctgggtgacagagcaagactccgtctctctctctctctctctctctctctctctctctctctctctctctctctctctctctctctctctatatatatatatatatatatatatatatatatatatataaaattttatttcctcactcttctggaggctaggaagttcaagatcaaggtggtagcaaggtaggtttcattctgacgactcatcttttggcttgtagttatccaccatttcactgtgtgctcacatgacctcttgtttgtgtgatggatagatagagagtaagaagtctctgtgtctctttttataaagacattaattctattgaataagggacccaccctatgacttcatataaccttaattacttccttagaaggcccatctacaaataaagtcacatcgtgggttggggcctcaacatataaatttggggggcacacaatttagtccacagcaaacattatatatcttccatttatttaagtcttctttgagctctctcaacaattttttaaaatttttcagagtcttatccatcttctgtcatcttttgtattaaatgttttcgatgtcattaaagatgatgtttttaaagatttgaatttccaattgtttgctgctaatatatagaaattcagtttagttttgtacataataggctttctatcctgaaaccttgctcaacacacatattacttctagcagttttctttagaactttttacatagaaaaatcatgtcatctgtgaacaaagatggttttacttctccctttccatctgcatgcttatggggttttttgtctgtttgttttgctttattgcaactgctaaaacctacagtacaatgttgaatatatatgataaaagcattcatctttgccttttcccaatcttacttggaaagtatttaatatttcatcattaggtgatgttagctgtaggttttcttaggtactttttatcagattgaggaagtttccttattataaataagcaaatgtcaaatacatttttgcttctattatgatgaccctataggtttttctcctttactctgttaaaaaggcaaaatatgttaattttttgttgttgttgttgtttgttttttgttttgaaacggagtctcactctgtaacccaagctggagtgcagtggcatgatctcggctcacgcaacctccacctcttgggttcaagcgattctccctgcctcagcctcccaagcagcttggattacacgtgcctgctatgacgcctggctaattttatgtgtgtatttttagcaaagacagggtttcgccatgttggccaggctggtattgaactcctgacctcaggtgatctgcccacttcagcctcccaaagtgctgggataacaggcatgagccccacacctggcctcattggttttcaaatattaaaccaacgatgaattcctagataaaatctactaggtcatgatgcattatcctttttatatacttctggatttgatttcataatattttgttaagaatttttacatttatgttcatgaggagtgttgttctatacaattcactcttgaacaatgtagggtttaggagcactgatacaagcacacagtttaaaaatctgtgtataacttttgactcccccagtcagaacttaattactaatagcctactcttgactagaagccttaccattaacatgaacaatcaacacatattttgtgtgttatacgtatactgtagtcttaccatgacataagctagagaaaagaaaatgttaaaaacaaaataaagacaagaaaatatacttgctattcattaagtggaagcggatcatcctaaaggtcttcatccttgtcatcttcacattgagtaggctgaggaggaggagtaagaggaggtattggtcgtgctgtcccaggggtggcagaggtagaagaggttctacaaatgtcaactagattggtttggttgatggtgttcaagttttctatagccttactgattttctattttttctattattattattattattattgagacagagtctcgctctgttgcccaggctggagtgcagtggtgtgatctcggctcactgcaagctctgcctcccaggttcacgccattctcctacctcagcctcccaagtagctgggactacaggcgcccgccactacgcctggctaattttttgtatttttagtagagacagggtttc[143 bp omitted]gcattttgaagctctgttaataaatgcattcagatttagaattatgtcttttgtttttagctgtattttccccatatagcaaaacaaaaaacaaccaaaaaaaactgctacttggtttcttcacaatttataatttttaaaaatatataaatagaagtgagcaaaacgagagagcaaaaatgaattatattccacttatagaatcacaccattttagaatatgtctttgaaaatgttttccatgcatattgcgatggccttttataaccaaataattatgaacatttttccatgtcattattctttgacattatttttagcagctgatatggtttggatctgtgtcccagcccaaatctcacattgaaatgtaatccccaacgccggaggtggggcctggtgtgaggtgattggatcacagagacagtttctcatgaatggtttagcaccatcccccttggtgttgtcatcacgataatgagttctgatgagatctgctagtataaaagtgtgtagcaccttctctccctctctctctacctatctcttccccctgctctggcaatgtgaagtgcctccctccctctttaccttctgccatgataggaagcttcctgaggcctccccagaagcagaagccactatgttttctgtacagcctgcagaaccatgagacaattaaacctcttttctctatatattatctagtctcaggtatttctttacagcagtgcaagaatggactaatatagaaagttggtactgaggagtggggcattgctataaaaatatctgaaaatgtggaagcagctttggaactgggcaacaggcagaggtttgaagagtgcaaggggcagaaaagaaggaagataagggaaagtttggaacttcctagagatttgttgagtggctttgaccaaaatgctgatagtgatatggaaaatgaagtccaggctaaggaggtctcagatggaaatgaggaacttattgggaactggagtaaaggttacttttgccatgctttagcaaaaagcctagctacattgcgcccctgctttaggaatccatggaactttgaacttgagagtgatgatttaccatgcctaagcagcaaagcattcaagatgtggaagaggtgacctggctgcctccaacagcctatgctcatatgcatgaacaaagaaataacctaaaacgggaacttatatttaaaaagaaaagcagagcataaaagtttgaaaaatctgcaacctggccatgtggtagaaaagaaaattccattttcaggggaggaattcaagcaggctgcagaaatttgcaaaagtaaaaagaaggagtcaactgtgaacagccaagacaatggggaaaaggactggaaggcatttcagaggccttcctggaagccccacccatcacaggccctgaggcctagaaggaccgaatggtgatagtgatttctcatgagatctggttgtttacaagtgtgtagtacctccttactctctcttttcctcctgctccagcaatgtgaaatgccagctcccccttcaccttctgccatgattgtaagtttcctgaggcctccccagaagctaagcagatgctgccatgccttctatatagcctgcagagctgtgagccaattaaacctcttttctctataaattacccagtctcaggtatttctttatagcagtgcaagaacagactaatacagtggctatataatattccattatgtggatgatcataatgaaattaacttcacattacatttacatttatttctttaatgttaatcttacagttattcattaattggaatcttcctttcaactcttttgtcatttgttccattacctttcctctcagtttaggagaatccacagatatacttggcaagagctctccatctgctctaagatgtagatataaatatttcacaatacaagccccaggtggagtcctgtgttcaacttctagagctatctacccaatcaacagccattccttccatattcttcagaaatattctctcaaccaattctgtatctgcctacgtacactgttatctttcttctaaaacatggttctgaatactgtgttgtgggaagctaagtaatttcactgattttttgttgttaaggtagagaccttggaaagtcatttatgtaccatatttggcacctatagtagactctattgaagccctcctagatcccctgaaatccctatcaccagctccacatgcccactctccacctctgtgttttttgttgctaacagcttgcactgatgactttcagaagactgactgggggcaccaaagctgcttccctctgaaaattttacactttatcctgggaaacctataagcaataactgactaatttgagagtataaagcccagctcctttgattcaaggtggtaaatgctggggtgtaattcaccccagaactcctcatgggatcaggctgagtctgggacctgatatccaatctttgcctggattctttcctttccctatcctgtttctcccatcctacagatttctcctgagagcagttcctttataaatcacctacaccagactcctcagcccaggcttttcttttggtagcaactaaccttaagacagcatccagataacgtccaaagcatcactcaaagtagattccttcccaggccccactcacactcttactacccaacaccttccaaatccaaaagcactgctgtgctgaactgtaaaaccacttgacatctgaatatctatgcttgcattcaaagaataatgagggtttttattcactttgcaaaagaattcacaacaaggctcccaatgtagggaactctagcgtatgtttaaagtaacatcacaaaattttaccccaaagaatgacatagggtaactttccagaaatgacacatcccatacaaggcagtgccccatataccaacccaatcactgagactttgaaatttttctctgtgaaagtggctttctcctggggcctcctggtaagtttctgactcttttcctcagctccctccctcataccctgaagggagttgccatggtgactgtgggactgtgacctccagggtagctcaggctcagaagaaagggtttccccagggtggctgagaagcaaggagcagagacacaaatggcattctcttcagtcagtgggcaaatgtttaacgagtttatgtcgaggcgtgtgttgggaaagtgctggaccatcttcagatgcagcacaggtgactctgggcccactctgctactcatgggtagaggtgttaacaatacactcgccctgatcctgattcagacagatgcctgcagcaaaagaaagtcactctcagggaggcagttgggactaactggctctaattcattattggagctcactgatatcaagagaaggtcaaactacatatgtaaatgaggctgtttttatcccaggatctaaacccacttaaccaagaaaatgcaaactacctcacttttgttgaattagctcatttgaatagttgaataggagagaagccagggaggggcaaatggccctgaactcaggaacttgcccacccctgaacatggagacctcactcaattctttcttcagtactttttttccacattattaatttctgtctttttttttttttcaggcagagtctcaccctgtcacccaggctggagtgcaatggcgccatctcagctcactgcaacctccctctcccgggttcaaatgattctcctgcctcagtctcccaagtagctgagattaccagtgcccaccaccacgcccagctaatttttttgggggggcgggggacggagtctctctctgtctcccaggctggagtgcagtggcacgatctcggctcactgcaagctctgcctcccaggttcacgccattctcctacctcagcctcccgagtagctgggactacaggtgcccgccacaatgccccgctagtttttttatatatttttagtagagacggggtttcaccatgttagccaggatggtttcgatctcctgacctcgtgatctgcctgcctcggcctcccagagcgctgggattacaggcgtgagccaccgcgcccggctaatttttgtatttttagtagagatggggtttcaccatgttggccaggctgatctcgaactcctgacctcatgatctgcccacctcggcctcccaaaatgctgggattacagtcgtgagccactgcacctggccaatatttgtcattacaaattaattttttagcaatagggtctcatgctgtcacccaggctggagtgcagtggtgcaatcatggctcactgtaaccttgaactcctgggttcaaactccttctgccttaccttcccaaagtactgagctactgcacctggcccaatgcagacttctaaagttaaagtcttcccttccttagctcccactgctgtcacttcaggtaatgactgttaacatcctagagtatgcagccttctgtatctttctctgagatcatttaatagtatacaaccattccccatatatctctccctcccccctcacacactatgacactgtccttgctgattgctttttgcttttgctgcttaacattatatcatggtaccatggggattcctccaggtcaacatgtatgggtttaatgcactctttaatatttctataatattctataatatttaagtactataatttacctaacattcccctattaatggaaattcagattctatccagcttttgctactagaaacaaccttgcaataaatattatatgtatatatctccttaaaatacattctcatattgggattgctgtgtcaaaggattttttttttttttttagataaggggagtctcactccattgcccaggctggagtgcagtggcatgatcagagctcactgtaaccataaactcctggattcaagtgatcctcccaccccaacctcccaagtaactagatctataggcacacatcaccaagcctgactaatttaatttttttttttttttttttggagagatgaggtctctctatgttgtccagtctggtctcaaactcctggcctgaagcactcctccaacttcagcctcccaagtagctagaactacagatgtatgccaacagctaggatgtgttcatttttaattctaatactcactttgagattgctttcttaaaagggtttagcaattcatatatccattaacaatgtatgagagtccctgtttactcacaccgttgacaacattggatgttatcaatctttaatttttgccaatctgatgactgaaaatggtattaattgttgttttatcttgcagttccctgactacaaatacagttgagtgtcttttcatgtacttatcagctatttgtattctctcatctgtaaaatgtttgttcataggctgggcacagtggctcacacctgtaatcccagcactttgtggggccaaggcaggtggatcacctgaggtcaggagttcaagaccagcctgggcaacatggtgaaaccccatctctactaaaaatacaaaaattagcagggtgtggtggcacatgcctgtaatcccagctactcggggggctgaggcacaagaattgcttgaatctgggaggcggaggttgcagtgagccgagattgcgctattgcactccagcctaggtgacagagcaagactccatctcaaaaaaaaaaaagtttgttcatgtgctctgtccattttttaaaagctttgtctttttttcttatcaggttacatattaggaatgttgtttcttgtctgttgtgtgtattatcattagtcttttgactcagagtgacttgatgatttttgtcccttccttctcagcttcactcgtgaatgtcaactttcaccattttttctaacttaaccgtcaaagatatgggactgggaagaggcagaccatgaccatagaacagagaggaggctgaagtcataagagaagagtttgctctaggaggctgggaaaaccaagttggacagcatttggcatctataatactctttgttctgctttaaatggtcctcctcttatgggaatagaacccttctcccatatccctttagccagctcactcctactcatccttcaaaacccagctcaaacatcactgcctctgaaaagccttctctgatccacccacaagctgacctggagacccctctgtgcataattctattctagcactcgtcacatcaccccctgacccatcagtttcttgtcagtctccctttcagactgagtgctcctttagagcaggacactccctgaagcacagttccaccctcaggatctagcccctctgagagtattcaaaaaaggatttgaacaaatttagcaaattgttcttcagcagcactgtgccaggtgctgtggaggtgacagatggattatagcacatgacccctgatctcagagagatcaaaaactagctgagacataagaacgcactaacattgaaacaacagcctgtgaaagcaattacatttaagtagactattatgtcattgagaatgcacgtgttccagaaggcctgggctgcatgtgcggggggcacaggaaagaatcagggagaatgtgggacttgatttgggtcttggttgtgggcgaagtctggatgtgggacttaagggtgggtgggatttggacagagggtaagaggaagtgagggcagctggtaagagggcaatgggcaaaagtatgggtgttatttttaaagacagggtcttgctccatcacccaggctggagtgcaatggcacaatcatggttcgctggaatctcaaactcctgggctcaaagtgatcctcctgtgtcagcctcccccgtagccaggattcttcaatacctccataatattctataatatttaagtactagaaacagtggagggactgaagtgaccagagcagagagtttgtgctgggaagaggaggaaaactgagttggacagcatctagcctcccggcaaggaatttctgaattatggataaatatgcatattgcctcccagattccaagagctgattatggcactctgccacgtatgctgaagatgtgttcatgtgtttctcccactcaactgtgggcttctggtcagtctggagtgtaattggcagaataatgcccctctccccttacccacccccacgcacaaagatgtccacagcttaatccctggaacctgtcaatacgttttgttacatggcaaaaaggaattaagctagcagctggacttaaggtcactaaccaactgactttaaaacagggagatgatctggattattggcgtgagcccaatgtaatcacatggatccttcaaagtggaacagaagcagagagtcagagggaaatgtgactacagaaggtcagggtgacacagtgggaaggatttggctcaatgttgctggctttgagaatggaggaaggctgggcgtggtggctcacacctgtaatcccagcactttgggaggccaaggcaggcagatcacctgagatcaggagttggagacaaacctgggcaacgcggtgaaactccatctctactaaaaatacaaaacttagctaggtgtggtggcacatgcctgcaaacccagctacataggaggctgaggcaggagaattgcttgaacctgggaggtgggggttgcagtgagccgagattgcaccactgcactccagcctgggcaacacagtgaaactccgtctcaaaaacataaaaaagagaatggatgaaggaggcaagaagtcaaggaatgtggggggctctagaggctggaaaaggcaaggagataggctctccccagagcctccagaaaggaacatgtccttgccaacatcttgattttagcccaggagacccatttcggacttccaacccagaaaaccataagacaattagtattgtttaaggtagggaggccccgacccccaggcagtggaccggtaccagtcagtggcctgttaggaaccgggccacatagcaagaggtgagtggcaggcgagcaagcattactgcccaagctctgcctcctgtcagatcagcggtggcattagattctcataggagagtgaactctattgtgaactgcgcatacgacggatttaggttgcacacgctttgtgagaatctaatgcttgatgatctgaggtggaacagtttcatccacaaaccatctccccccaccccatccccatccatggaaaaactatcttccacaaaaccagtccctggtggcacaaaggttggggaccactggtttaaagcactaaatggaaggtaatttgttacaacagcaatgggaaactaatataggagggacctatatgtgcatacgtctcatctgtatttacatacatgcataacttggctccagtaaattgaagtgttcagaaatgattacttaatgaaattacataaagaattcctttcggtcaggcgcggtggcttatgcctgtaatcccagtactttgggaggctgaggcaggaggattgcttgagcccaggagtaacaagaccagcttgggcaacatagcaagactttatctctattaaaaataaaaaaaatttagtcagacatcgtggtgcatgcctgtggtcccagctacatgagaggctgaggcaggaggatttcttgagcccaggaggttgagggctgcagtgagccatgatcatgccactgcatttcagcctgagtgacagagggaagagaccgtgcctcaaaaataaattattttcatcacagtattatttacagtagcaaagacatggaatcaacctaggtgtccatcgatggtgggttggacaaagaaaatggtgtacacatacaccaagaaatactatgaatcactaaaagggaatgaaatcatgctctttgcaacaacatggatgcagctggaggccattagcctaaaccaattaacgcaggaacagaaaaccaaataccatgtgtcctcacttataagtgggagctaacccttgggtattcacggacataaagatgataacaatagacacgggactatactagagtggggagagagggaggcaggcaagggttgaaaaactaactcttgcgttcaatgcccactacctgagtgacaggaatcaatcatacccaaatctccacatcacacaatatgcccaggtaacaaacctgcacctgtatctccttaatataaaacaaaagtggaaattattttttaaaaaaagaattcctcttgtttcaacatctctcccagaaaacaaaaaccgaactccatccatatacccattgcttgtagccgtgtgcttcaagtcagtttgctctttagcacagactttgatttcgctattataaataacactatagccagccaggtgcagtgactcacacctgtaatcccagcactttgggaggctgaagcggtggatctcttgaggtcgggagtttgagaccagcctggccaacatggggaaaccccgtctctactaacagtacaaaaaaattagccaggcacagtggtgggcgcctgtaatcccagttactcaggagtctgaggcaggagaatcacttgaaccttgggaggtggaggttgcagtgagctgagatcacgccactgcactccagcctgggcaacacagtgagacaccatttcaaaaataaataaataaataaaactagagcaagcatctttcctctgtttttgatgaaatttgtttatcctaaatgaaattaatgagtcaaaaatgacgcacattttgtgtggctcttcactcatttagccagcttactttccacagagtttgcactaatctacacactcactcacaacgtgggagagcaccaccctctgccacaactgggcccggcaggggacacatgcacagtcccctccttgcacattcaactttttcctgctccaatatcgactgcataacttcaggctcaagtggggccctccacagtaagcagagatcctaaacactgcgttgtggtagaaaaagtgatttctctgtagccacaaggaacattctttagggataatgctggtccaggagggaggagtctgaacatccctagtttattttatcagcaattgcaatgagagggttttgtttgtttgtttgtttgtttgttggagttgcaagagatgatctgcctgttcagggagctggtcatcttccactgccctcaaatagaaagcctggaaattgtacctgactgacccaaaagaaaaagctggtttatttaaaagtctggttcctttatcccctttgcaatacagtggtaggtttttggtttgttttgttggtggtgtttttgtttgttattttgtttgtgtttttaacgagttctttggtgactatgctaaaaagaccatcatggaagcaagaacatcaataattttttcacccacttccagcccccaggacagagacagacctggaggcttcatcgtcccttaggactgactatcttccttgcttcagggaagaaaaaaatcgtatgacaatgttgcttgccttggcttgcctgtgggtgtgggggatacagtccaggcacggagaggcacccgagtaggagcaggataaaagggcctcccagagatttaggctcagagactccagggagattgggcagtcgctgtcccagacgctatcatgagctctcagcctgatgcttccatgtgaaatggggccaatcagatctagccctaggacgacagtccccccctgcacccagaggcacagtctgggactctggcaggcctaaagtaactaggttttgcctgcacatgtttgatccaaagagtggaaaaagcctttggactccggaggtcttcactggggtcctggccgctctccagactttcctcgtgaccgggggccttcggttccctgggcctcgggttctctctctgtgaagtggccaaacaatcctgcctcccagggagcgagcacgcggcttgtccggggagaaaagagcaacaaatatttataaatccatcactgaggtggcgctgaaacagctgacggagcgaagcctgacccagtcgggtcccgggccctccacgggggtctgcgtcctcccgctgcctcccacccacccctgacagggcggggcagacctctcgggcaacttcccagactatgaatttcctttggcactttgaggctcccccaggaggattcatgagaccgcagcaggaaatgaggaacatatttttaaatcagaagggggaagcaatgtctttctgtcagataagtggcctggatccagggctgagagactgtggcgcatttctcctcgcagacagcaggtgctcttcgagatgtggttatggcaacaaaataaatgatggataattgcttttgtgacaacttgccaattaaattagactcagcagaataacataatgacaatttgttatgctccgatgggcactaacataccgatcataattaaatgctatgactgaaatagaataccgctcaacgcaggaatatacaaccccaattccctctctgtgaaactttataggttgaggcttgattttaatttcaggaagataatggcattagctcatatccgagtgggtttgtggagaggcctgtggtgaggggagatgggcctgagcaggaaggcgatgcctgtaaggaaacacccggggggctgaactccaaggtcaaggggaagggctgaggagccctgtcgtgaaaatagtgcttgctggtctgggaaatggaggcaaaggaggagcagagcagggaaatggaggcaaaggaggaggccctcgcccatggtctgcagtgacagggcccgtgctgtgaacaactccaggcctccacgctgaatgtgtggggcatgtccttgaacaaggagcccagactcacaggtgatgttaaagaggagcttaggggcgacttggtgctaggcatgtacagcaagtagtagaagtgagaagtccactcagtctgcagatgccctgccttcccctgcccctggtgacagctgattgggccagaagtgaatagctgacccaaggtgggccaatcaaattcttcctctggaaactttgcaggtgagctactgagctaattctataaaacagtcatacatgtacagattgatgtgtaagcacttccctatattataatatacatacaggacacgcacatataaaagctgcaactcgactgtcaaaaacttgacctaaacgtgatattctaggtattgattgtgtattcaagttttaatatatttgttgatgaattcccaaaccattccataaaagatttgaggtggcttttgaaaaaatcaagtaagaataattctgtttgctgtttttagagtttaaaaggggtttctatatagacaaaaaggatagttggtgaggtctctctctcttttttttttctttttttctttcttttttttttttttttgacagagtctcgctctgttgcccgggctggagtgcagtggtgcagtcatagctcactgcagcctcgaattcctgagctccagtgatcctcccacctcaggctcccaagtagctgggactatggacgcgcaccaccagacctggctaacttttgtatttttttgtaaagacagggtttcaccatgttgctcaggctggtctcgaattcctgggctcaaacaatgcacctgccttggccccccaaattgctgagattgcaggcgtgagtcacctcacccagcctctcactttcttgcttacaaatctcaattttttaaaaaacaaagtaatgcaaaaataaattatatatttagtaatctaaagtgtttaaaataaaaactcatgctcctcaatcctactccccagtgatgatcactgacatcaactcggtgtatatcctccgagcctttcttctctgcctgagccatcctttaaatgtgaaaatggctccaaggttatttatgggtacaatgatagggtatatgggatttgcttcacattaatccatgggtgaaggagacaatgaatgggatggaaaaagaatagccaagagcttaaaattgttgcaaccagccgggcgcactggctcacgcctgtaatccctgcactttgggaggtcggggggagtggatcatttgaggtcagcagttcaagaccagcctggccaacatggtgaaaccccgtctctactaaaaaaaaaaaaaaaaaaaaaaattagctgagcgtggtggtacacgcctgtaataccagctactcgggaggctgaggcaggagaattgcttgaacctgggaggcggaggttgcagtgagccaagatcgcaccactgcactccagcctgggcgacagagtgaggcttcatttcaaaaatatatatatacatatatatatatgtatatatatatattttttgcaaccaggtgatgagatgtggagtttcattacactatactctttacttttaatgtgttttaaaaattctacgggtggtggctcatgtctataatccttgcactttaggaggctgaggcgggcagatcgcttgaggtcaggagttcaagaccagcctgagccacatggcaaaaccccgcctctacaaaaaatacaaaaattagccaggtgtgttggctcatgcctgtagtcccagctactggggtggcagaggcaggagaattgcttgaacctgggaagtggaagctgcagtgagccgggatctcaccactgcatttcagcctgggtgacaaaatgagaccctctctcaaaaaaaaaaaatatacagtacaccaggtatagtggctcatgcctataatcccaacactgggaggtcaaggcaggaggatcctgccttgaggtcaggaattctaaactgacttggtcaacatagtaagatccccgtctctacaagagaaaaaaaaattaagttagcccggcatggtggtgagcacctgtagtcccagctactgaggaggctgaggtaggaggattgcttgagcccaggagttcagagctgcagtgagccctgactacatcactgaattccagcctagctgacagagagagactctgtctcaacaaacaaacacacaaacaaacaaaaactacaatcatagcttacatttttaactactgttttacctttttttcttttaaaaaatagaattttgccttatgtgccattcatcagtttactctttaaaaaaactaacagcttgttgtggacatagctccatgtctgcacagctattctttctcatagttttccattgtatggattttctacaacttaaccaacctctgttaccctgaaggactatttgcagtgtttttctataccaaagaatgctaagtaaacacacttaggcatacatctcttctctcttgaagaaggtttccgtatgacacattcctaaaagcataatttctggctcaatgggaaaatgtattttaaatttgactgcaactgccaggctcttcatcaaaaatgttatggcaagtcttagttttgtcagctatggatgcctttttatctgtatccttccaaaacactgagtactagcaatctgtttaattttggctaattttgatagggaaactacatctcctcttggttttagttgtgttgttttgtattttgttgctaatttagagtatcatttcatgctttctatgccatatgtgtttcttctttgtgacttgcccagatgtcacctgtgttcatttatctatggtatttctttttcttactgatctgtaggacatttttgtatattatggatgttatacttttatcagttacgtatgtttaaaatattttcttccattctttaacttttgtttgtgacatttttcaccatatagaagttgttattgttgcttgtttgtttatgtagttaggactgttgttcttttcctgctgtcttctggtttttgtgtcatgctcaaaaaggacctattttttttctagcacttttattgttttaatttttatttttaagcctttaatccatttcggatttatttcaggtatggaaccagaaaacgggcacaggaaccaaatttgaattttctctgaaattcacaacctttccctgtttatgtaataaaccatccttttctcactgatgtgaaatgctatttttgtcatatatttaattatcatatatacacagatttttttctagactccctgttgtacatattcccctggtctaattgcctattcctatacatgtaccatgctgttttcatggttgttgctttataatacatttgatagctagtattatatacataatattatatgcttatatttcaaatttttattttggctaattttatccttccagttaaactttattatcaagttgctaagttaaaaataaaaactgcaatgagatctgattagaaatgttttagttgtatatattaagttgggaaaggtggtccaagtttctgaaagacaaaactatccatggatgcccacacataccctggatgccatgaccagaattcagtgtgctcaggttcagtctaggaatgatccagccccacactcatgtcttacttcactcagcctgctctgtattcaactcctgttctctcttcccattgggttctgtctttgcacatttgggctgctacagcaaaataccttatactgagtaatttgtaaacaacagaaatttattgctcaccgtgctggagtctgggaagttcacaatcaaggcaccagcagatgcagtgcctggtgggggcctattcttcataaatggcacctcttgctacatccttacacagcagaagggggaaacaggcttcacctcttttatttttatttttatttttatttttgagatggagtttcgctcttgtcacccaggctggagggcaatggcatgatctcagctcactgcaacctctgcctctcaggttcaagtgattctcctgcctcagcctcccaagtagctgggattacaggtgcccaccaccatgccaggctaatttttgtattttttagtagagacagggtttcaccttgttggccagactggtctcgaactcctgatcacccacctcagccttccaaagtgctgggatgacagacatgagccacctcaaccagccactccacctcttttgtaagggactaaccccattcatgctgccctcataacctaatcacttcccaaaggctctacctcttaataccatcacctcacgggttaggtttcaacatataaattttggtgagacacaaacattcagacaagctctaactctaattcctacttgcctatgagttatgtttctctagccttcgaatcatctccttctctcccagaatggcatggctggtcttctctcttttgaccattgtgtaatccaccccctcataccggtgagacctgatgcttccaggctggttctacccatggaagctggccagtaggatcaggattagacaatatcttcgatgccataataacagaaggaaatttcaaaatcttctagcttaaactccctcctttgacttcattccacaacacaaagatgaccatggggctcagacaaataaagtcatagaataactgatgggataggaaaggtattttgaattttttggcagtagtgacaggtgacacctttctctagtgtccaccttcccggtcccctgcagagaagtggaaaggaaatagtctaggacaatgctgtccaacaaatcattctaccagttccagaaagagactgtcttcatggagatatgaagtttctcctagccaaactgaacttcctaccatttcctgctattagggtcccatgggtgtttgacaggcccaggactagggtgaggcaagagctgaatctgcactcacatgacccaagtgtgagggactcgctacacttgttcctaggtgtctcacttgcctcaccctagtcctagccctggagttgggttgtgtgtcacaaatgctgtggtcccctccccagatcccctcttcacctgttccagctctggggactaagctcacagctacaaccctcattgagaattactctggccacaaggaacttccctgcccaatattataccccttccaggggggacgtctatgatcaaggactggctgaggcagggatgaaaacacctacttttttttttttttatatcactttagaagaactctaaaagagccatcccctcatccagagctccagagcctcagctcccacaatgaattaagaactatgatgcttggtgggtttcatcggttctggaggtgccacagtccacactgtggaacagtactctaaccctgcaggtaacaaagaaagctgccagctttgaatgggacccagagcaggaaagggctctgcagcaggttcaggctgtggtcagaaagccctgcctcccgcgctgtgtgactcggcaggctctgtggtcctaaaggctctgtgttttttgtggaggaagaaacaccacatggagtttctggtgaacaccaataggaaataatattatagattcctagagttctgaagcagggcatgccatctgcaagaaaagctacacacccattgaaaagtagctcccaggccaggcgcggtggctcaagcctgtaatctcagcactttgggaggccaaggcgagcggatcacctgaggtcaggagttcaagaccagcctggccaacatggtgaaaccccgtctgtactaaaaatacaaaaattagctgggcatggtggcgggtgcctgtaatcccagctacttgggaggctgaggcaggaggatggtctaagcccaggaggcagagcttgcagtgagatctcaccactgcactcaagcctgggcaacagagtaaggctccatctcaaaaaaaaaaaaaagaaagaaagaaaagaaaaagaaaaagaaaagtagctcccagaatgctactggatcctggtagagatgaggcttctgaccaagtgacaccaagtaaccagacaactgtagctccccatcatgaactggatctgtcagatccacagagtcacgagggcaggcaagcccagtagcaatcagtcgttcgatggaagcggtacatttaggatcggcacccggaagctgcatgggcaggtagcccaggctcccatgtcatgtgtcaatatttccctgggccctggccctcagcaatcacctatagctgcatgagggcttccttacggccagctgacagcagaagcaaaaggccaagttcagttcatagaagggtcagctcagtgtggcagtgtgagctggggctgctgccagtcggtggaggcagggaggaatacgtttggcatttggataatccactggggcatttcttggtgttccatacccattttaatgataatgggcaagtacaacaaccaggtcttgaaaagagcatggtatccatgtggtcagaaccctcaggaatgagggtccaggtcatcccacccaacaagtctcttagaccagcagagatgccagccaagggcaggaagactctggtacaggtggtggagaaggggcataaggagtaccaggtagaaccttgagatcaaatgcagcatcagagtctgtgtctgtcccattaacccttctcttgtcagtttccccaggaagcaaaactcactacaatcataaataagccatcagagatggggcaaacttactacaagaaacaagtgactctgagccacttgaagggtcatctgtcacagacactgcccacccagatcccttttcagggcccacacacccatcccctagctactgagaataggggctgctaatggctcagaggttcatccctcattgggaaatgcatgacccaaggcacatcccctcctgggggagagccttagtcaatgactggctgatgggggatgcaaaggcccagctctctcacagtaggacagctctggagggccatcccagctccagagttccctgtagaattaactgaggtctccatggccagcacattgtggggcagctactccctctgccccgtcctgcctcccttgcccccttacaagtacatctcccaagaacactcctaattaatgttctgcgtgcagctctctatctcagagtctgtttccagggagcccaacctcagacatctcccaatctcaggctgagatactgggaaacacaaatgatactgactcagtcccctgactcaagggacccaaacagttacacagtgatctgccaatcaacagttgagcctttgactggtcttcaggttggttgtttccaacctgttccctctcactgggattaaaggaaattacccaaaagaaaaagaatgcagcctataccacacttcaatggtcacgtccattcatgtgccgtccttccccacttgaaaccaaataactgaaaaaactttccatagtaatagtgaaggcttcagcaagactggacaaacccagggacctctgctaggaaacatgactaagcttgtccttctgaatgaaagaggaagggctattagcattgatgaggtccacagggaattcagtgttatacaggaatattttttgtatatgacagagaaaaatgtagaaaacagactgattgattgacagacaacctaattttttaatctggacatctttaataaattctgtaatgcaggattatcaatcttatctcacctggatttctacccttcacaaagagatggccttgattttagaggccagagtaagtgccttctttatcaaaaggctcactgtcaatgtccaagttgagcggccctgggtcagtcctcaggaacaaaatttcatcaactttttatggtaagagagtttttctgactagttacacataggtaatcactctctttacataaaaccttcctggatttgaagtgcaagcaaaatgcaaatgccactttcatctggatgcggtaatgcggctccaagaagctaaagtcactgtcgcaagtttcacattggcagaatgccgaattcttaacatccagaatctcttttgactccttacaaccatgagaagcaggggaaatgctcttattatccccatattgcagataaccaaactgaagctctcagaagttaaataacttgcccaagattccaaaatgtgtcagagctggaccccaacctggtgtgtctgatgtagagccgtgtttttaaactatgatgttatactccaatatcctaagtatttttggccatgtcatctatacatcataacatcacagccacttacgtttcatacttccacacttacatatcaaattgaatattttctacaatgatttaaaaatttcaggttgtacttcctccccacttttgggggaatgggagtatggtatattgtctattgaaatttctcaagattttttagtcaatttatttaaaggcatttcttacttccacgttaataataaaattcaaattctaatttttttttatttttttgagatggagtctaactttgtcacccaggctggagtgcagtggtgtgatcgtggctcactgcaacctccacctcccaggttcaagcgattctcctgcctc[131 bp omitted]cccttggcctcccaaagtgctgggattacaggcatgagacactgcacacagccttaaattataattttttaaagagtcacaagtaaaagccaaaaggaagttctatgtttgaccttctttgttaaaaaataaatgtacagaggacaggacaatgtcttctgtagtttgcctgatactgagccaagtgagattttcatattaaattttgctgtccagtctgggcacgggggcttgcgcctgtaatcacagcactttggaagccaagatggggggatcatttgaggtcaggagttcgagaccagcccggccaacatggtaaaaccccgtctctattaaaaatacaaaaattagctgggtgtggtagtgggcacctgtaatcccagctacttgggaggctgaggtaggagaatcacttgaacccaggagacggagattgcagtgagcctagatcatgccacagcactccagcctggatgacagagtgagattccgtctcaaaaataaaaataaaaataaataaataaattttgccatccagaattttattatgctttggggagacagagtgggaggtaagaacaagattgttagtgacatatttgtcctataataaattttaaaattgttttttgttctctgaagatatcttcaaacttatcttttatttatttaaacataataagcaagaaaagtcacatattgtctgtagttcgataatctcaacagcttacatctttatagatctgcttctattctatctagtttccttgtgtacctggttatctttgaccatattccagcactttaaaaattaggtataggaataatatgaggcctctgggtgtagatatacccagagatgatctgcttctgtaatgtgttgggatcataccagtctgggaccaccttaagccaaatccaaggcctgagatttcctggacctggacaatctgaataattggaacctgagttatgattctgcaggagggctgctccacttctagccaccctccccctcaggatataccctgggaagtcccagtgtactataggagggccgcctctccttggctggctcctggcttccatttctgcactctcttccagccaggctgcagcccatccgtggaagttccccacagaggatcagcaaatacctgcagggcaaaaagagctttggtgctccttcacctctctggttcctattctctcttccctgttgacctagtcatttcttactatcttgtcagcaatttcatactgctgaagatttccaaaaaatagtttacgttgttatttgtctccagtgggagagttggtccacatagtttagcctaccattgctaggaggtctcatcctgtaagcttctcaagaaataaccaactcaggccaaacggtgggccctactaataggtgttaagaaagacctaaagttgatttatgtgtcttaaaacaaaataatcgatttttcaacaaacacatctttctgcttactgaggcctgtagttccagaagcatgggtttagggtcttcaaaggaaggggggcattgggggtgggaagggaagtgcataagaatcacccacagcctcaggtgcaccggctctgctactgagcagttctacaaccttggccaataaggccagctcttggctggttttctcatccggaaaatgggaataatgaaaatcataggccgggcgcggtggctcacacctgtaatcccagcactttgggaggccaaggtgggtagatcacctgaggtcaggacttcgagaccagcctggccaacatggtgaaaccctgtctctactaaaaataataaatacaaaaatgagccgggcgtgatggcaggcacctgtaatcccagctactcaggaggctgaggcaggagaatcgcttgaacctgggaggcagaggttgcagtgagctgaaatcgtgccactgccatggtggcaggcacctataatccgagctactcgggaggctgaggcaagagaatcaattgaacctgggaggcagaggttgcagtgagccgaaatcgtaccactgcactccagcctgggtgacagagagactctgtctcaaaaaaaaagatcataatacctgtctcacaatgtcgtcatgtggattgaatgaaattgaatgatacaagcaaagcctttagctcaatgtttagcacaacaacgtctgttaagtgttgggcaaacattattattattattatccccaaggtgctgatggcctaagacacatactcaccagaccatcccctctcccctgcacatgctcacagtcctagttcagtagttggaaaccactgccttagttaatgatgatttgaataaatcactggattccaatggtccagttgctaaagacattattctgaaggcccgaaaggcaggcctcctgaattttatctcccttaactcattctgtgacctacaaattgaaaggaggaaaataattcagatggcgaaagggcctggagatacccccccaataaaagattcccctgcaaccacgtggcaagttgtgctgttatgataaagcggaagactgtttggaaataatcaaaaattctctcaggaagcccaattatatttttacatcaagaatcaaaatgctggtgctgcagacttcagcctatcattcacaaaccttttatcctgtaattaagccagatctgctgctgggctaattcttccctgaatgacaccaccctttgagccagcccgtatgtcggtagaagacttcactctgatgatctattacaccaatacatcaccgcggtgagctgcctccttaatgatttatccataacacatcatcagagtgaggcacacttgtaatatattgctcaataagtctgcagtggccaagggagaaagccacgaacagcagccgagtctgtgcccttacacggctggtgtcagagcgcaggacccacgctgggctctcctctctaaacaaatgtttatataggtgggagggctctcatgccaataggcttttaaaacatgaagaaccatgaccttaagaaagcaccataaatccagaggagaaaggcccctccgtgtgtagtagggcttactcttctaagcctgtcatttctaagcattttaagctcttacttagtagaaggccgggaccactgcaacacacaccccaggggatgccattctcattgtagtctgcgcaaatggtgccccctggaattgtgcaacgtgcggcctgagtcaccccacatggcagccctgtaggaagacctatggttaaaagcatagactctggcatcattctgccttgtttgaatcaaaattcctggaataacagtcctatttcatggagttgctgtgagattgagtaaggtaatgcttgtagagcacttatcatgtaataaacactcagcaaatgttagcctcttctaatagctaccttcacaatgctgagtgccaggaagcctttaggtccaggcctaaggtagcaggctgcccctatagattgtgttctttattctggcagacgctgtctaatttttatgtatttaaatgctgcttcattcaaaagaaaaaaggggagagtggataaaaaggtgctcatggggctgggtgcgatgagcctgtaatcccagcactttgggaggctgaggtgggcgaatcacaaggtcaagagatccagaccatcctggccaacatggtaaaaccctgtctcttctaaaaatacaaaaattagctgggcatggtggtgcatgcctgtaatccgagctactcgggaggctgaggcaggagaatcgcttgaacctgggagtcagagattgcagtgagctgatatcacgccactgtactccagcctggcgacagagcaagactccatctcaaaaaaaaaaaaaaaaaaaaaaaaaaaaaggtgcttacggaaatacataataggatgaatataaagaaatgggaacatctgcgaaaagagggagaaagattaaataaagtttaagcaaaagtaatgtacaaaaagaatgccaagaatcagtaagagtggggtcacgggcacacccattccctccagtgggagcaagtcagtgcaaccactctggagtgcaacttggcatcacccaaaaagcgaaagatgagccctaccgcccagcaatttcactcctaattgtatgccctggctcagagggattcttccttgcacacatgtacaaagaaacagggataataatgttccctgcaacatcctagagacagcaaaaaaaaaaaaaaactggaaacaactgaaacctccaagaggaaaataaatatataacaataatagccaactctctttttaaaaaatcactttttgtttttgagacagggtctcagctctgtcacccagtctttactgcagtgacacaatcatagctcactgcagttcaagggatcttcccaagtagctgagactacaggtgtccatcaccacaccaggctaatcattttgttgttgttgttgttgtttttatttatttatttttatttttatttatttatttattttgagacggagttttgctcttgttgcccaggctggagtgcaatggcgtgatctcagctcaccacaacctctgcctcctgggttcaagcgattcttctgcctcagcctcccgcgtagctgggattacaggcatccaccaccacgcccggctaatttttgtatttttagtagagacggggttttaccat[133 bp omitted]aaataactctttttaatttatttgcatagtgtttttattctactacatacataaaaatagaagctacaggtgaattaagtttattaatgtggtcttaaacatcttcctgttcagtctgacatgtctgaatccctttcagactcagtgtctttgatgtctgtgcttttctacataccttcctgttctgttccatgaaggacattagtgatatggcatttcttaaaagaatgttccattagtgcttatgagaccaagtcttacactatataccaggaatattttcaatgcttttcacctattaagtcatttattttcgcctctattagataggtggtatcattagccccattttacagatgaagaaacagagacgagaagaggaggttaagtcacttgcccaaggtcacagaactagtaagtggcagggttggggtttgaaccaaggcagcctggccccagagccatactcttaaagcctacatattcatacatctagtcttagaatagaatattgtacagcagtgaaaatgaattaactagagttacatgtggcaaaacaggtgagtttcaaaagaaaactcttgagtaaaaagatcaaattacagagggatacatgcagtataaagccacttttataatatttttaaatgtgtaaaacaatactgtatgtttattatagatacatacgtttgtagaaaaaattattattttttaagtagggaagataaacaccaagtccaggaaaatatccaccacgagagtagggacaaagaagaaagggatcaggaatggatacaagaagctcatgtcttaacctgggtgatgggtaagtagatatttgttgtagagtctctgtaatttttgaatgcctgaaatatttcataataatcaaaaataatgccatctcctactccagagctgcatgtaactgtaaattaagctctgaatttccccacagccaaagctaagagggaaactaagacaccaaatttgccaagaccgcagaagcaaaccacccaagttgttcaaaagcagcacagttttttattccttaagctaaaacgtgaaagatatttatcccacgggtcttcatagaggaaaaaatggtcagtaacattcccacagaaaaaaacaaaagtatgcctcatacaaccatttcctagcatccctcaatgcattgtaacagcttaatgtcaaagcaggcttcagaagcagcagctcagctgggcgaggtggctcacacctgtaatcccagcactttgggaggtcaggaaggaggatcgcttgaccccaggagttcaagaccaggctgggcaacaaagaaagaccccatctgtacaaaaaaattgaaaaatgagacagggtctcatacacctgtagtcccagctattcaggaggctgaggcaggaggatcgcttgagcctgggaagtagaggctaccgtgagctttgatcatgccactgcactccagcctgggtgacatagcgagaccctgtttccaaaagaaaaaattaaaaataattaaattttaaaaaagaagcagctgctctataaagggaactgtctttattgccagcttctgggacatttccagagagaacagaccttcatgagcaagagggaagcaggccgacttgaccacagtagcctggggactgacacagccttaactctgggaaggaccctccttcagattcctgctcaggggcctgggacccatagctgcagacaagccataaagatatcctacagtcctgggatctgaaagcattcaccctctgtttagttcttctcatgatcactcagacttcttggaccctgagtccatccagctgtctgttgaaaccattggctcttaccttcatcttacaaaggcgggagccagctaggcaccgtggctcacacctgtactccagcactttgggaggccgaggcgggcggatcacctgaggatgggagttagagaccagcctgaccaacatggagaaaccctgtctctgctaaatatacaaaattagccgggcctggtggcacatgcctgtaatcccagatgctcaagaggctgaggcaggagaatcgcttgaacccaagaggcggaggtttcgatgagcagggatcccgccgttgcactccagcctgggcaacaagagtgaaactctgtctcaaaaaaaaaaaaaaaaaaagcaagctgattatttagagatgtaaaggtacccaccagacgcactaaaaacagaaatggttaaaactagttggccccaagaacaggcctggggtcggaggggtggagagcctgttcagaaaattgtggggaaatttgaaaatggactgagtacgaggaaatcttcaaaaactggctgttaaatgccatgttgttgggtttgataatggtattgtattgatataagaaagggtcttattttccagagaagcaggctgaagccttgggtgagagaggttttgtgggaacttgctttaaaatgcctcagaaaagctggaagctgtcgctcatgcctgtaatcccagcactttgggaggccaaagtggagggattgcttaagcccaggagttcgagaccggcctgaacaacatggtgagatcctgtctctacaaaaactcagaaaatgaggcgggcagatcccttgagcccaggaggttgaggctgcaatgagccatgattgcaccacttgccctcccacctgagtgacagagcaaaaccctgcctcaaaaaaacaaacaaaaaacaaaacaaaaaaaaacacttcagaaaaaatatagatgagcaaaaacagcaaaatattaataatggtttagtctacatgataaacatatggaggatctttatatgattctttttttttttttttttttttgagatggagtcttgctctgtcgcccaggctggagtgcagaggcgcgatctcggctcactgcaacctccacctcccaggttcaagcaattctcctgtctcagcctcccgagtagctgggattacaggtgcacgctgccatggctggctaactttttgtattttagtagagacagggtttcaccatattgcccaggctggtttccaactcctgagctcaggcagtccacctgcctcggcctcccaaaatgctgggattacaggcatgagccactacacccagccaattctctctacttttatgaatgcttccataatcaaatttaaaatgtgggtttgttttgttttgttttgttgtgtttgagacagggtctcgctctgtcagtcagcctggggtgcggtggcatgatcataaatcgaggtttcagtgaaacctcgaactcctgggctcaggggatcctcccacttcagcctctggagtagctgggactacaggcacacactaccacgcatacctggctaatttttaaaaaattttttgtagagatgggggtctcactataatgcccaggctagttccgaacacctggcctcaagtgatctgcctaccttggtatccctaagtgttgggattacaggcatgagccactgtgcccagcctgaaaagattttaaagaagtatttaataaatcttggaagatgctgattctgctcttcttggagctccgcttggacccatggacccaaagaacaggacttcagggatcttgtagctcaaccccctcatcttacaaatggctaaaaaggtttgaagacttaccaaagtcatacagccaacaaatggatgagctggggccaggctggggtctccaggagccttacccagtgtcctatctactgtctcatgtctgcctcatttttggacaaaaggagctatttttaaatgtcaataaagaaccggggtacactcagttctttttttcttaaggcagacattgcctatgggtcgatgggttctcatcgtaaaaaacccctgactatacccggaaagttttattctcttcaacataaaattaaagtatattcaagtcctttagatcttacagccactcctttgggggttggcaaagcatgtgtcagtcgagcaataaacatctgtcatctagagctcattaatattaattacaagtggccagtggctcaggggacctcagtcctgcagatgagattttcctaaatttgaccttcttagacttacaggtgtttaaactggttcttttaagaagccagtctatggccaggcgcagtggcttatgcctgtaatcccagcacttttggaggccg[134 bp omitted]gaggcaggagaatcacttgaacccaggaggcggaggttgcagtgagccaaaatcacgccactgcactccagcctgggctacagagcaagactccatctcaaaaaaaaaaaaaaaaggccgagggcagtggctcatgcctgtaatcccagcactttgggagaccgaggctggcggatcacctgaggtctggagttcaagaccagcctgaccaacatggtgaaaccccatctctactaaaaatacaaaaattagccaggcgtggtggcaggcacctgtaatcccaactactggggaggctgagactagagaatcacttgaacccaggaggcggagtttgcagtgactggagatcgtgccagtatactccaggctgggtgacaagatcgaaactccgtctcaaaaataaataaataaaaatttaaataaaaaaaaaaagccagtctaggcccatttcaacaatcaaaagggaagaaataaacactcccaagtatcagaggttaggttgcccaataagccaggaggggcctggccagaatgctacaggactgtgggacattctggtgccttctgtctgcctggagcttgggttgccagatcctcctccttagctggcccatctcccacagcccttttctcttctctcacataggaaagttggggatggggcaaagctaccaaagacaagctttaccttctcatatttaaattggaatttttctgggattaagcccactacctcttgttctaaccttgggggcccttggagggtgggtaggcagagaaaccagatgtggctcaggcacactcactgaggtgacctggatcccgggcactgagccttcccttttcccatctgaaaatggagcccctgcccatgctatgggagtcagcctgtggctgctggcagtagtggcaaagccacccccttgtccctgatgtcacactcaagggggctggaagccttgaggagccagccaagtgacatctataccagcctggttctcagcgggaagccagatccgagaaggcaatgggctccgggagggcagaggaggtcacctgagctgcagagaaggggcagggccatttcgccccactgggcgggagccagcaggagctgatgataaagctcaggacctcctcgtatgcactgaatattccagaaataaccctgagcacgcctagggtttccactgagcacctgggaaaggagaggctttgaagaacaatcctgcatttcctgcagaattttctaggaggcagagactagaaagctgaacttttccactagttgtccctcatcctgccacactccctctccggaggccatcgtcttggaatctacactgcttccaggttgaaggccagtagcatcaccaccagccccacagccatgttcttctttcctgcatctttatttcgcgtaacagtagaaggcttgagagtttacaaagttctgcatagccagcatcttattcgggttttgcaccccaaaacatacttggtgctaatattattttccccgtgtcaaaaacagggaaatcattcatttgttcacttgacaaatatacttccaaaaatctattaggttccagattctctcctggggctggatgtggctcaaaatggtcaagtgatttctctaaagccatggccacaaaggagtgccagcgtcaggatttgaatccagtccttttgactgagacttagagaggaaagaggtcagagcccttcccctgtaacccacctgggtggcacccttagctctgtgctcctctggcctcacatcccaggtaattcaaggcagaggggcccaccatacactggcagaccaccagggtaaaataaagtgggagggtaggaaggtcaaggatagatctttctggtcctctaggcctcatcctcaccctgcccaccatttctgccctggcacccactgcctccccatgcccttcatagggagaagctccagaaagagtttcagaaactcctaattgctgactagccccaggtccccaaaacaatggctctgatgttggaactattttccctggccgggcctctaggtagtgaccctctggctttcctccataatctggggcaaagagggtggagaaagaaagcagaaaagtgtgctgaaaggaaggcagttggggggagtgtagaggggcagcaaggaggcagaaaagggccgggcatggtggctcatgcctataatcccagcactttgggaggccaaggcgggagagtcgcttgaggccaggaatttgagaccagcctgagcgacatagcatagagaccctatctctacaaaaaaattaaaaataaaaaattagcttggcatagtggcatgcacctgtagccctagctacctgggaggctgaggcaggaggaccacttgagcccaggaggttgagactgaagtgagctatgattgcaccactgcaccccagcctgagtgacagagagagactttgtccctatttttaaaaaaaggaagcaggaaagaagaaacagaatgagtgtcattgagtgtcatttaaaatgttggtttctacacacacgcttgcccacaggcatacacaatccaagaagttactaaataaatgcacattttccagtgaaacctaccagcatgggataagttccaaaagcggatagttcccaagatgttctctagtttcctcctttgttgttgttgttgtagttgttttttaatttgattcatttacttggtgctagaagtttggaaggagataaaggacagagtaactactgggggtgggggatagagaaagctgtgtttagacgagtggctggtgaaagaggacacaataccgtttcttctcaatgttaatctagcgcatgttaattcctccccacccagtgggaatcgacagtggctgaaagccttctaggcactgacagcaaagacggagtactcgccaagaactttgttcacgttctcattcagtcctcacagcaacttagtgaggtagacgttgttacccttgttttacagataaggaaattgaggttcagacggttcactaactcccctaatgtcaccagacaaagcaacagatcagggtttcaaacccaggtctgttctccaaggcctgggttttttccgctgctctgcctccctgcctgcactgttctctctcccgctgtcctccacagcaaattcgcagatgtgtcattgactggagaaggttaggaaacactgctctgggcagagtctccaggggctcagcgcagtaagctccttcctctccagctcctattatggtgcaaacagtgccgcttccccggcaggcctttgtcatttgtcccgtggcctgtcccctcccatctctaccccatcccagtagcaccccaggacctcagcttcctaaatttcagccacaacattatttttacaaggacactcttcaaccttgaaaggcaaggtaccccgaggcaaggaaacgaaatgactgtagttgaacagcatgagagtccagcgccatctagtggtgctgaaaccgacaagtccctggcggtgacattttcaaataatcaatatctcattattaaccataatcacaacctgatgtttacttttggagaaatgttcagcagcaagggatgcacatgcacttttctgcatgtttcagaggcctgcgatcctaaatgccacaatgactattaaacagtgtcctgcccatgagcaaacaggagagattgattgtatatctttttcatctaagctgctcaccaaaaacaaagctcagttgaagccagtgacctttcactaactgctggaaggaaaatgcttgataaataataaatagaccactactggatcttgcttagaactatcttttaattaaaagaactgaggagctagaaggtccggtgactgacatttatttcagttgcagtccaggaaaagcattcattgagggtaaaatgatacttgaaatgtattttcgttgtcagctagtattccccaaaaaccctgtctgtaatctgcatggatggagggtggtggtggtggctggcagtagcaacattttgtagggaacataacacttaacttcctgccttctctgccttcccctagcaaccttttctttttcgtgctgcagcaataaacacttgtctggttcagcatcaccacagaaactgcttcagtgccgggctcatccaatcagagacccgcctgccacattgagcgctaccctaggagtgacaggaaagccatttcccgtcttttccacaggagggcaggtgcccttcctctgccagccaaggtgacctcgaccaagttgctcactgaacctgctcagccatccctcatctcacccagcacggtcaaaggctcagaacgcatgactaacttagcccgagtcaggctcccaccttttggctattctagaattgagctcagaacatagagaccaggaagtctcagccttccccatcccctcctccactcacctttgcttgctcctagctccagtcttctggctgaggccgtgccagcttgcgttgactaccagcaccacatcatgttctctgccctaactcccatgtactcaggaaaactgccagcccattctgagtcaggcttggtcacaaatgaaagctgaggatggatgaggcccaactccgggtgccacgtctggattccccggagcagaggcaggcaccagtgccagcctcagagaaaatcttactgtcccacttgagtgactttgtttaaaaaaagaaatctgctgaaggtttttaagtggcacgccatcatttatttacagagaaaggtatcactttaacaaaatcaggagtccttcgggggcagattattctgtaataccactttcattatcagagaactctcgatacaaagtgttctacaaaactacaagaagaatcaggctagccttttaaggacatcatcaaaaatcaggcctacccaataaaggcagaggcagagctctataaaatttggtgaatccaggaccacttaaacaagtcagacatatagatgatggaagacatgggacgtgaatttcttttgctggctttctcattcctcctattctatcacttaaagcatttacctgccagcccccaacatcccagatctctccccactacccttggagagctcatttcttctcctggctccaaatcttgcccctgtagacacctatcccttatctctgtctgccacttagatatagcaccatcaccttcaacttagtaggttgagaattgaagctctctcccaggagagcaccagttccacgtcaccaactgggtgttagtgatgctgctaagttttctagtcactcaggtttgtgaccttggacttgctgcctcctttttggtccctctgacatgtctcctctttcctccttccctgcccactcctccatcccattctttacatcactcctaggcaaacctttctttgacctgacactgctttcactacattctttctttccctgctcaaactttcccatacccaactggctcctccatgtagttgtcaaggccaccatgatcttatctcatcctaccagttcaaatgggcttttccactactgctcaaaatagtaataaaaccaccagccacacattacaaatgagctttgcactcatctcaattaatcctcacaaagctaactggaagccaaaaaggcaaacattgtccatattttacaggctgaaatactgtgacaggcacagggtcacatagtaaaaactgcctggagtatccagatctagaacccaaatcttcattacttgtctggggcaaacttcactgtaacctggatatatgccttcctcgccttggattcagcaaatccgtaggagggtctgctcctgaaaggctgtttaatgtttcaatgggttaaaagaataagaatttctgccctcctttatactttttttttttttttttttgagacagtgtctctcttctgtcgcccaggctggggtgctgtagcatgatctcagctcactgtaacctccacctcctgggttcaagcgattctcctgcctcagcctgccgagtagttgggattacaggaggctgccaccacatccagctaacttttgtatttttagtagagatggggtttcatcatgttgcccaggctggtctcaaactcctgacttcaagtgatctacccatcttgacttcccaaagtgctgggattacatgagccaccacgcccaccctatactcttaataggtaaataatcattactacttgaatgaaggccacagtaaatgaggcaggagtacaaacagtaggccaggtagaccaacagcagtgaagcaccttatgaacacaatctgtagggggttcagtaagggacttgatattatgtattttccgagcacagacagcatttgaaaacggcacggaaggttcaattcctacagaccatggtagaagggagggtgttcctgcccaaagaaaccgcatgtacatgtccatcccactgcctttccaggctctcatgcagtattcctagacaaatccagaactgattccttgcccctgaacctctactgtacttttatatcaaagtttaaaaggattcctgttcatcttgctgtttcacaagtcactcttgtagtcccaactcgattttaagatttttttttttttttttttgagacagggtcttgctctgtcgcccaagctggagtgcagtggcacaatctcggctcaactgcagcctctgcctcctgggttccagcgattctcctgcctcagcctcccgggtagctggtattacaggcacacgcccgcacgcccagctaatttttttgtatttttagtaaagatggggtttcactat[136 bp omitted]ttccattctctccaaaacgtgatggggatctgatgacagcttttgcccaaactgtggaaatagttctgagtttccaaagtaagcttcatatctttcactatgttttgatcactaagacttaacctaaagaagtcaatgagtgacagcagctttctccccatccagatatttgctatacagggatggtctttcccttctggtccagagtcccagtctggtttaacaagatcagaatgtgtaggggaacgcattctcatacattgctatgagagtatagttaagcacaatttctatggacgaagatatcaaaactcaaaatgatctgctccttgatccagcatcccataactctagcagcccatttgcaacacagtaaaacaaagaacattttcttcaatcgggcactgattaaatcacagtggatctctgagacatagtaactagaaaagcaaggtacagaacagtatgcatagtgtcctgtccatgcccaaaatatttctggaagagcgcacaaggaaatggtgatagtgatggcctcagggaaggggaaaagggtggctggggaacaggggtgggagactagctttttactgttaagttttgaaccatgtgcatgtataatttttttaaagaattatgcaacaaataacttctttaaaagtcttcagccccagtacggtcgctcaggcctgtaatcccagcactttgggcggctgaggcaggaggatcgcttgaggccaggagtttgagaccaggccagcctgggcaacatagcaagactccatctctacaaaaaaaaacaaacaaaaaaaatgttaaagagccaggcgtggtggcacatgcctatagtcctagctattcgggaagtgagccaggatggcttcagcccaggagttaagactgcggcagggtatgcaccactgcacccagcctgggtaacacagtgagacccccatctcctaaaacaaaattaaaaaaaaaaaaaattaaggccaggcatggtggctaacacccgtaatcccagcattttgggaggttgagatgggtggatcacttgaggccagcagtttgagatcagcctgggcaacatggttaaaagcccgtttctactaaaaatacaaaaattagccgggcgtcatagcatacacctgtaatcccagctacttgggaggctgaggcagaagaactgcttgaacctgggaggcggaggttgcagtgggccaagatggctccactgtactccagcctgggaaacaaagtgatactccatcgcaaaaaaaaaaaaaaaaaaaaaaaaaaaattaaaaatctacagaggaggaaaacaaacaaaaatagcaaaaatgggacatcaatccagacatgaaggaaaaaaacattttttaaatattcatcattgtggcaaaaaaaacctgcccttaaaaaaccagaaacctaaggtttaaagagatgagtgacccctcaattgttcctctgagaatagactgtgtctttcacctgctttttaagtcctcttcccaaggtctggcccgatgtttggtctcaatggttgtgtaatgtctctgaatggatgaaatttacttccctacggaaaagtaaagcattctccaaatgcaagcagttgtgaaacagtgataaaggtcgagggggaagcagcatggctgagagctgcttttgcctaatgtattcattcacctgcatgaaccaagcacccacgtgcatggatgtgtactatatacagactgtgagatgtggacctgcctcacagtgtaccaggagagatgagagcatacacaaagaatcactgggtagaaaatctacatgagttttaaaatagggaatttctgaagcagcttactactaacagctaaaaaccactggcttgaccacatatacaaaggctgcaatctcagagggatatttcatgtatttagtaaaacctggggaaacgaggaaggcagggaagttgataaggacttgtaggcacactttggccccagggaggcaggtggatgctggtggagagcatcacctaaattagctgcctcctttcttggcaatcctgttatctacaccatatgaatccagtctttagctggatataaccattcgttcactcattcattcaacaagtatttactgaacagcctagtctgtgcaggcctatgttaactgtctccagcacactcaatccatgacattaaagttacagttttggtctttgtgtatcagcaatgacaggtcctcactcttaccacaaagcgcaagtcagcttggcctctcaagtggagagataatcgttctatagcaagaagtacaaagattctctgcagacaaaaccagctagccaaggttccacaacatgtgtacacgtataagtctgatggatcagaagaaatatgtacccgggaatcagatgtagccagcccacatactaacaaacatcaaagcaagcctagtcagattgagtcccatttgaacaatctttataaaggtttcttcatgttatttacaattcaaagtaaatttactttataagcagctagggaattctttatttagtaatgtcctaacataaaagttcacataactgcttctgtcaaaccatgatactgagctttgtgacaacccagaaataactaagagaaggcaaacataataccttagagatcaagaaacatttacacagttcaactgtttaaaaatagctcaacattcagccagtgagtagagtgtgaatgccagcatacacagtatacaggtccttcagggaggcaagagacctttcgactggtctgcaggtgcctccaaatgctggtcctgtggaacttctttctgagtctcgttttcttccaacgcagtctgtggtctgacactcaagtgttcggatttccgggaaacgtgactacctccgtgttgcttaaaagaccagatttaagtatcacagagatgttatcattttcactcaattaattcgctaaagatatataactaggcacattctgtcactgagtgaaaaatttagcactaatatcttagatccaattct[137 bp omitted]cggtgaaaccccgtctcttctaaagctacaaaaaattagctgagcatggtggcaggcgcctgtggtcccagctactcgggaggctgaggcaggagaatggcatgaacctaggaggcagagcttgcagtgagccaagactgcgccactgcactccagcctgggtgacagagcgagactccgtctcaaaaaaaaaaaaaaaagtctatagaaccaaatttcaaaagccctaatgacgactcacttgtttcaagtagcagtcattaccacaaaattctagtatattcagtgtaacagtatttgacctggagtttaagaacataagccaaggttagggaaagaaaaccaagtctctctttaacttccatcagattggcaactctggtcaaccctctgcatctacaggttccacatatgcagattcaacaaaccacggatcaaaaatattttaacaataaataaataaaataaaaaatataaatttttaaaaatagagtataactacttacatagcatttacaatgtgttatgtattataaatgatttagagatgattaaagtatatgggaggatatgtgtaggttatatgcaaaaaccacagcactttataaaaggtatttcagcatctgtgaatattggtatctgcaggggccctagcaccaatcccctgtgcatactgagggacaactataaacccagtaacaattttaacaatgaaatactcacagtccttgcttcgcctactcgtcttaaaatgacaccttctgccaataaagccttccctgtttccacaaataacttctcttcatctgtttctccaagtttctgtagctcagtgtacttctccacaaacctgtaattccaagcagtcacattttaggtatgtttgtaagcattgttaagacgctgttacacaatatcaaatggataacaaaatccttaaaaaataatatgaatagcctaggacttataaaatggcttaccgttgacaggtagacttgaagtttggattgaatagatcaaaagctctttgaccagacccatacactgaataaaacttcctagaaaatgcaaacaacataatataaatctccgattatagactgtggatgagaatggaataaaagaaataaagaataagtgctaggcactgaggagttaagtacggtataacccacatagcctaagctgaacagttttgtttttttagataagtaatgcacacatgcacatggtaaatacatcaaatagcacaaaagggtggccagtgaaaagtaacactccctcccacttctgcaccccagccccccagttcccttcccaggaagcaacactaacaaatttcttgtatatccatccagaaatattccactaatatactagcatatatgcactatcattccctgtccccagccacatttttaaccccaagaatagtaaaccttgctctacatcttgcctttttaaaaactgaggtatggctaggcgcagtggctcatgcctataatcccagcactttgggaggctgaggcaggcagattacttgcaactgggagttcagcatggtgaaaccccatctctactaaaaatacaaagaaattagcaggcatggtggcatatgcctgtagtcacagctacttgggagggttaggtgggagaatcacttgaacccaggaggcagaggttgcagtaagtggagagcgcaccattgcactccaacctgggcaacagaatgagactccgtctcaaaaaataataacaaaataaaaataaataataaaaactgaggtaaaagtcacacatcataaaattaactttttttttttccaaagagacagggtctcactgtgtcaccaacgcaggtagcagtgctgtgatcatagctcactgcagcctcaaactcctgggctcaagcaatcctcttgcctcagcatcctgagtagctggaactacaggttcgcagcaccaccatgcctggctaagttttaaatttttgtagagatgcagtctcactatgttgcccaggctggtcttgaactgctagcctcaagagatcctcccaccttggcttccaaaaatgctgggcttacaggcatgagccattgtccccagcccacatttaacatttttcagtgtgcaattaagtgacatgtagaaaactcacaaagctgtgcaactagcacctctatcaagttccaaaacattttcatcacccccaaaaggaggcactgtatctgagcagtcactccccatttctcctccctacatcttgccttatcagtgccatggagattgtttccagtcctttactactctaaaccatgctgcaatcattatctctatttataattttagtgcactacgtaaataagtctgtggcataaattcacaaatgtggtactactggatcaaggtatgtgcatttgtaattaagccttccaaattgccaaaatgctttccaaagtggctgtaccaatttacattcacataggtaatatacgagcacctatctccccacaccctgaccaaatgacattctccagctgagcatagaggctcacgcatataatcccacctgcttgggaagctgaggcatgaggatcttttgaggccaggagctcaccaccagcttgggcaacatggtgagacctgagaccctgtctctaaaaaaaaaaaaaaaatatatatatatacacacacacacacacacacacacacacacacacacacacacacgaggcaggtgcagtggctcacacctgtaatcccagcaaaaatatatatatatatttagaccaggcgtgctggctgatgcctgtaatcccagcactttggaaggccaaggcaggaggatcacttgaggccaggagttcaagaccagcctgggcaatatagtgggacaccatctctacaaaaaaaattaaaaattagccaggaatggtggcatacacctgtagtcccagctactcaggaggctgaggtgggaggatcacttgagtccaggaggtcaaggctgcagtaagccatgataggcaccactgcatcccagtctgggttagatcctgcctcaaaaaaaaaaaaaaaatacacaaacacacacacacatgttctccaactttttgatcttagccaacctaataggtaagaaaccagaactctttatagttttaatttgcttttctttttaaagagactggacatcttttcaagtttaaaagcaaactgaatttccttttctgtgaactgtccaagttctttgtccgcttttctatttggtggttgctatggactaaacgtgtcccaccaaaattactatgttgaaatcctaatccccattgtgatggtatttagagatggaggctttgggaggtaatcaggtcatggtaatcagccctcatgatgggattagtgcccctataagagatagaagagagcttgctaccactctctgctcccctcaatgtgaggaatcaggaagacagtcctccccagaacctgaccctgctggcaccctgatctcagacttcctagcctccagaactatgagaaagaaatttcatttgtttataagccacctggtctatggtaattcgttacacagtggtctctttcttaatgatttctaagcaaactttgtagccatatacatagaaaattagtcctttgtcataacattgcaaagatctttcccagtttgttggctgtcttttgattttgcttacagtacttttttatacagaaaattttaatattttctttttatggcttctgagttttatatcatgcttaaaaagacctttatcactcagattatttttttaattctcccatgttttcttccagtactgttatgatctcactttttacacttagattttaatacatcttttttgtttgttttatttattttgttgtaagttcctttttcttttttttttttttaagagatggggtcttgccatgttgccaggctgttgtgagtgcagtggctattcacagatacaatcatagtgtactacaaccttgaactcctagactccaatggtcctccttcctcagcctcccaagtagctggaactacaggcatgcacaaccactctataagcttttttaaatatcaaaaccaccaaaaaaaaagagggccacaaagataaaggttcaataaattatataaatacaagataatattttggtgttaatagaaataatttttatatattctgacaatagtaaaaaattaaaaaataaaaaaagaatttaaagaaataatatttaacaggctgggcatggtggctcatgcctgtaatcccagcactttgggaggccaaggtaggtgaatcactggaggtcagaagttcaagaccagcctggccaacatggtgaaaccctgtcttcctgaaaatacaaaaaaaaaaaaaaaaattagcccgccgtggtgacacatgcctgtaatcccagctactcgggaggctgagaaggagaaatgcttgaacccgggaggtggaggctgcagtgagctgagattgaaccactgcactccagcctgggagagagagagagagcaagactccatctcaaaaaaaaaaaaaaaaaagtaatatttaacaagagggacaagtaaactattccacattctccaatcatttatcatccagtccaaatctacagcagaagcacaaatgattttttaaattttttatttatttatttatttttgagtcggagtctcactctgtcacccaggctggagtgaaatggtgcaatctcagctcactgcaacctctgcctcctgggttaaagcgatcctcccacctcagcctccagactagctgggactacaggtgcatgccaccacgcccagctgatttttgcatttttagcagaggtggggtttcaccatgttgcccaggctggtttcgaactcctgacctcaagtgatccacccgcctcggcctcctgaagtgccaggattacatgtgagagcaaagcacaaatgattttaatgtatcaatgaaccacaaagtgcatgcaatgggtctgagaagaaaggtgctgaaaaagcatttaatctcctcaaagatctcatgttgtatgccgaaaatatccaagtagaacaagaacatacttgttctgctactttaaatgagtgttggtgttgggggtcccggggtgaaagcctgggccccaattcggaacataatgaccttataaattccattttctagcatcctgaaacaacagtaagaataagggatgtgtatcaaagtcaattaggcacactcattggtataaatatttaagagaaaaaggaactagacaaattcaaggtactaaaagctaattaacatcagtattcaaggggaggggctttgtcagtaaactcccagtgagagatttaccacttacttagatcttacataaatgtatagggatgctaaatgtggccatagaagtggtttctagcccactgttcctgaaattgtttcagaaaactaataaaattctgatggccattctccaaacagtcccagtcctggccctccaccattcctctccaaggaattttctttcgtttctctctaccagcctcatagttcatctgtccattaatccattagcttcttcattcaagagacgattaataagcaacttatatgccacacaatgggctaggcactgaagttacaagaatgaatttgacaatgcctggcccatgacagtgcttaatgaatgtttgttattgaataaagacagggcatttggaatgtagagctattaaagacaggctaaggccacaacaggggcagtatgaacaaaattcagggcacacaaaaggggaaacatgaaaacagaaaagtagtcccaaagaagtgtgacatctttgttttttttttttgtatgaaaaaaataaggtggggggcagcccccacccagccagccgccccgtctgggagggaggtagggggcagtccctgctccgccagccgccccgtccgggagggaggtggggggcagcccccgcctggccagccgccccgtccgggagggaggtggggggtagccaccgcccgaccagccgccccgtccgggagggaggtggggggcacccccgcccggccactgccccgtccgggaggtggggggcacctctgcccggccgccccgtctgggaagtgaggagcccctctgcccggccgccaccccatctgggaggagtacccaacagctcattgagaacgggccatgatgacgatgggggttttgtcgaatagaaaagggggaaatgtggggaaaagaaagagagatcagattgttactgtgtctgtgtggaaagaggtagacatgggagactccattttgttctgtactaagaaaaattcttctgccttgggatgctgttaatctataaccttacccccaaccccctgctctctgaaacatgtgctgtgtccactcagggttaaatggattaagggcggtgcaagatgtgctttgttaaacagatgcttgaaggcagcatgctcgttaagagtcatcaccactccctaatctcaagtacccaggaacacaaacactgcggaagaacgcagggacctctgcctaggaaaaccagacacccttgttcacatgtttatctgctgaccttccctccactattgtcctatgaccctgccaaatccccctctccgagaaacacccaagaatgatcaataaatactataaaaaataaaaaataataaaaataaattaaaaataaaaaataaaaaaaagaaaaaatagagaactttaaagatatttttaagaatgttgctaggaggccgggcacggtggctcacacctgtaatcccaacactttgggaggcaaggcgggcggatcacgaggtcaggagtttgagaccagcctgaccaacatggtgaaaccccatctctactaaaaatacaaattagccaggcatggtggcgtgagcctgtaatcccagctactcaagaggctgaggcaggagaacagcttgaacccgggaggtggaggttgcatggggctgaaattacaccactgcactccagcctgggtggcagagcgagactccatctcaaaaaaaaaaaaaaagaatgttcctaggcaaccattaggagcacat[145 bp omitted]aaccctgtctctactaaaaatacaaaaaattagccagctgtggtggtgggcgcctgtagtcccagctactcaggaggctgaggcaggagaatggcatgaacccggaaggcagagtttgcagtgagccgagattgcgccactgcactccagcctgggagacagagtgagactccatctcgaaaaaaaaaaaaatacttagatcagaaaaaaacaaaactttttttttttttggagacagggtctccctctgttgcccaggctggagtgcagtggtgcactctcagctcactgcaacctccaccttctagtttcaagcgattctcccacctcagcatccaaagtagctgggactacaggtgcccaccaccaagcccggctaatttttggtattttagtcaagacagggtttcaccatattgcccaaggtggtctcgaactcctgagctcaggcaatctgcccacctcagcctcccaaagtgccaggattacaggcgtgggccaccgtgcctggcccagaaaaaaaaaattcttaaataatcattatcaatactgacaaggataaagtaagaactctcagaaactgctaatcagagtgtaaactaagacaactactttttttttggtagagacaagtcctgctatgttgcccagggtggtctcaaactcctgggcacaagctatcctcccttatgcctcccaaagcactaggattacaggcacaagccaccacatccagcctgtgatttctttttatgctttctttgtgtatctaaattttctacaagtagcatgtgttgcttttataataaaagaggaagtattcttgccactgagcttaagaaaaagaaaaaaaaagagaaaagggatgctaaaaaaaaataaagaacacatgattttccttcaaattcctagtgattgtctctctctgtcgcccaggctggagtgcagtggtgggatctcggctcactgcaacctccacctcccaggttcaagcaattctcctgtctc[134 bp omitted]tggcctcccaaagtgttgggattacaggcgtgagccaccgcacccggcctctcttagactttcaagcatcctttcatctgagtggcttcaaagagccggactactagatccacagaccacgttcctcctatctccactcgtggagaaggccggcataatgatcaccataagcttggagtcagagatgtgattcccagatctgccaccctcctatatatttagtaattacaagaagttagctaatttccttgagcttcgcagtctccttgaataaaatggaaacaagaatgccttccttacaagttagagtaaggcctttagagaatgagataatgcttgcaaagagcttagtacagtgcctggcccaaagcagatgcccagaaacatgcggctataattgcaatgatctttcggttgctgggctccagattccacttttcagaacttcagtttcactatgaggaaggggtgctgcctccctaatttggctagataagccttctccacagggcaaacccctgactcaatttcatgtttgaattcccagactgctaccgaaaccttcccttctgaagttctgttgcctcctgtccactacagggctgagcactcacgctctaatccgatcctcgtggtaccagatgtcttggatgggagctttggctttgccatatcgcactcgaggcctttggaagacgggctccctcagcgggggaaaggcgtcatatacgtcaaaccacaggggcttctccttcagcaccccggcccgaaccaggtcccgagtccttagggagggaacagaacgaaactgggtcacttgcagtagcctgccaaagcccctgaatcagtctagcacagtttgggacattaaaggtattatgcggtctgcaacacagaacggggaaggactgctccccacctacagagaagatctgtccacatcccaaaccaaacttaacaacgctcaggagagttaaatccctctatcttcttttgtgcgtcccacccacgttcggtcacggaaaaatgcaaagagcggtcttgcatgacctgataaggaaggcccatcaggctcttcctcccttcctcttcctagagacctccactcggggagaggcagctgcaataatctttaacatgacacataaattcaaggagaggcatcctcaggcacaactattcggagccaggagaaaacatgagagggcctcacccagctcagcccccgcaccctgcaatacgcctcgccctgctcaggtccgctccaaggaagagcgtgaccggctgagaaccccagcctgggggaggcaccctcagcccaccacggctgggagcacacaccgagagaagatgctccctacggtttccagccggctgcctgccatgatctgcgcctggtaccgagcgtgactagctgctaccggaaccggaagcggctgctccaggtaaagggcgcataagttgctggccgagccaaggatcgctgggctttcaccgcagcccctgcgggagagcggcgcaggcagaagcaagtgataggccgaacgggcgcgctccgaggttacttgccaggttcaggcaggagcactcgatagccgagccaaaagggcaggagcgagccaaagccggacagaagtaataaatgaccgagctgtgggagggattcatcatgatggttgctttactctctctcgccttgttgagccaactcctctgaaaaggtggggccgcgcggaggagaagtagtggggcagagcaggggtgaagcgcagcctacagtcctaggggagccaacaaaggccgagatttgaggtcaccagctctaggcccaggctgagcctaatgttgtttagagtcacagactacgcagaagaaaaccaaggccggggaggggccgtcacttgcccagcgtcgtgctagatctcgggcctccgcctctggctgtgtagtgctccccactaagcccctcgtccccggagtgccacctgcatccacgctaactaggatgctggctgcaactcgtgtttcccgcggccggtgtcgcgggctacctcctccttggaactcgaaaagtgaaagtgtccggaacaaacagacgccgagagggaaacgaaaaaatctggagaaagtcatctctcagtgttaaactgtaaaaaaatataaactgtgtgtagcataccctttgacccagtaatcatatttcggggaaagaaccccttagaaattaaagcatcaattcatgaggatgtttgtgcaaggatcatcgttgcagcattgtttgtagtgggaaaaaaaatccatcagatgagaaatagctggaaaattattgttcatactttctttggaaccctatgcagctattaaaatgaatgagctagatccacatgtatttaccaaggttaaggtacatgacttatgtttaaatgaaaaacgaagttgcaaagaaacatgtttagtggaatctcaacgtgttagaaaaaaaaaaggaaaaagaaacacctctatatatgtttgtgtttgaggatagaaattctgcagaaggacacccaaggctgtgaacattggatatctcggagtgaaactgcaggcaggcaagggagaattttttcttcctttacacatgcttcagagtttgacttgtaaagagattgtattcatatttgaacttttaatccaatgaatgttttgaatcacacacaatgtctcctgggagcctagtcaagtcatcctagagtcctcccactctgaggctggtgaaggggaggacgggactgtttgatgagtagttactgcttgtgtgtgttatcttactgaatccacataccttcccataaggtagctattaacatcctcattatagatgagaaagcaaggcctcaggaagttacataacttgtctgataagcaactgatagagccagccttgggggggtggggcagccagggccctttccagtgcctcacaatgccgcctaagctatgcctaaagctcgaggctggtaggctcaagagtccagcagaacgccgctccccacccgccccccccacaacacacacacacacacacacacacacacacacacacacgcacgccagggatccagtgatttgaggcccagggctaacctgaggtggatttcactgctgcctccagaccctctggaacagagaagagagagcacagctctggccccaggccaggtgtaaaggctctagtatcccagccctcaggaggtctaaaagaccttgctctggggagagtaaacatgctcccagctaaatatagtcttcccaggcctcataacaactttctaattctgtcccagccagcaagcactatctgccagcccagattacaggcacacttctcttctcccaccaggaactgctactgtaggttagtgcagtcactgcagctaaagagttaaagggtttattccaagatcaaggaggggaaccaaagacgcaaaccctcaataggggaagaactgcaaggcagaaatgttctcgctaatcttggggtggtcccttcctcttccaagcctttgaagtttccctttccagcctgcttctgtgactgagagcagaatattggtgggcagacttgggggtactttggggataacagccttctgaggctacacaagaagtacacacccaagaaacattcattcataatacaggagcaagctgtcgggcagcagggggcaggcagaatggacatttgaggctgtcttcttgagtggggaccacagccgcccaaggctgtgagggcctggggcacttacaccacgcaccactgtgccgcgggaggtaccaaggaacctcaagtgtctcattcagttgttcaaccacctgctgacataggtaatgtcctgctaatcttacagataaggaagtggtgcttgtaaactcccaaaggccatgttcctacaacaccactcggcctcatattaatcccactgtctcattgtagacgtgcccactaattgcttcactctgagcaagttatgtaacttttcgagcctctgtttctccaactgttaaaatgtggagctgggctcagtggctcatgcttgtaatcccaacattttgggaggccagtgtgggaggattgcttaagccaggagatcaaaaccagcctgggcaaaattagccaggtgtggtggtgcatgcctgtaatcccagctactcaggggactgaggtgggaggatggcctgagcccaggagttcaaggctgcagtgagccatgatcacaccactgcactccagcctggtcaacagagccaagaccctgtctcaaataataataataataataataataataataataataatctggatggcagtgtcaactatcttcgtggcttgttgcaaaagtaaaagagatcattcatgtaaagcactaatcacggcacctgggacatagtgagtgcctgtgagcagcaacaagcctgatggctgtaacagcaacacgattgctgttgtgctgtgtcatccacccattgccacctggactgcagcattttgataatatttcatagattgccttactgttttactttcttgttagatgatccgttcgttccagaagcatataaacacctacctgactattctgagtcttagagaatccaacggtccagtagggaagacagagaggtaaatacataaatattaagttatgtgctgaatagcttgttgattgtatgaagtttgctaggcctgccctaacaccacttgcacacaaagtgggtggcttaaacacagatttattttctccctattctggaggccagaagtccaagatcaaggtgtctgcaagtttagtttattctgcacttggctagtttctccttgccttggagacagctttcttctcccacgtcttcacatggtctttcctctgtgtgggaaggttttgtcctaatctcttcttatgaggacaccagtcttattggattagggcccaccctactgacttcattttaacttaattacctctttaaagactacctcctattatagtcacattctgaggtactggagttaggacctcaacatatgatttttggggagacacagctcagcccctaacatagatcagtaagtgctgaatagttcccatttgcccaagcagttccacacccactctctgccgtccttcgccctgttctgtgcctcgggaggctggcttctgtggcctgcatccaccagctccttgccctctgcttctggctggattccagttggtactgccagcgggctccctcctggaacataaagttctagaacataaaatcacagctctctcaccaggttccagccaccgtccctctcctgctccttcaagcctagacgtagttggcaagctgtacccctctgttattagccacggggtctaggccatcccttgtggcttcccatcactctgcccacatctttgtgacaatgcccgtatttaaatagtgcgtggaggtcaggcgtgatggctcatgcctgtaatcccaacactttgggaggccaaggcgggtggaccacttgaggtcaggagttcgagaccagcctggccaacatggcgaaacctcgtctctactaaaaataaaataaaaaataaaaaataaaaaaaattaggcgggtgtcatggcacacacctgtaatcccagctacttgggaggctgaggcaggagaatcacttgaacccaggaagcggaggttgcagtgagctgagattgcaccactgcactccaccctgagtaacagagcaagactccgtctcaaaaataaataaataaatattgtgtgggaatttgtcagacaaaatgaggaagagcatcatccccagtagtggaacagctttggtaagtgaaactcccagcacactgatgaaatcatgaatgctgctactcacctatgacagctaaaatcagggagcaattagctttaaagggaggaaagcaatacagtatattcaatacacagtttaagaattatgtcaggccagctgtggaggatcatgtctgtaatcccagcactttgggaggccaaggcgggaggatgacttgaggccaggagtttgagactagcctggccaacatagcgagaccttgtctctacaaaaaaaaaaaaaaaaaaaaaaaaaaaaagaagaagaaaagaagagaaagaaaaaagttagccagtgcagtggcacaagctggtagtgctagctactcatgaggctgagacaagaagattgcttgcgcccaggagttcgcagctgcagtgaactatgatcgtgccactgcaccccaacctgtgtgacaaagtgagcccttttctctaaaaaaagagagagaggattatatcaggatccgttaaaaaaaaaagaattgtaggcttcctgagtctgaggaccaggaggatgaagggcagggagggctattaaaggaggaggcagccaggcacagctgctcacgcctgtaatcccagcactttggaaggccggggtgggtggatcacttgaggtcaggagttcgagaccagcctggccaacgtgatgaaaccccgtctctactacaaatttaaaaattagccaggcatggtggttggcacctacaatcctagctactcgctacttggaaggctgagccaagagaattgcttgaacccaggaggcggaggttgcagtgaactgagatcgtgccactgcattccagttggggcgacagagcaagactccatctcaaaaaaaaaaaaaaaggggggggggagtcagagtaccttctctttccttccggctgttgggcttgtgcccctctcctgagagctccccttcagacccccttcctaggcttcaaggaactgtcaagaatcagttcaggtggaaaagcttttcagcccccagcacacactcggtaagatcgggtgagtgcccagacctgctccctcccttcctatgcttatctctttcagggctatgtctgtgttgtaactctgtttacctgtctgagtctggctacaggggcctttttgagggcaggaactaggacttttagctctgcctccccacacccggcctggtgcttggcccacagctctcagagttttccagtgaacagcatggataaataaagccaagttaggacaaatgaggatgctgtcatctcagccttcccttcactgcctgtgcatacccagccctccctctctcccaggcccagctttcctttgaggccttccccagatacacagatagggagagagctgtgggtgaatggaaataatcccctacctcaccattcacttcacatcgtgagcatttccggtctggctgtcctctgtgcctcactgacagatagttctcttttacagtcctctgggcctcagcttcatttgtaaagtggggataatcatagcacctagcagagggtttgtagtgaggcaccagtgggttcatacctgctaagtgtttaaaacagtgcccggtatatggtaactactcaataaatagagtgatggtaatttcggactacgctttagagcaacagtgtccttcaattaaatctcacctgaggctggctgccatgactcatgcctgtaatccagcactttgggaggccgaggtggaaggatcgattgagcccaggagtttgagagcagcctgagcaatacagagagaccttgtctctattaaaaatcaaaaaattagccaggcgtggtagtatgtgcctgtagtcccaactactcgggaggctgaggtgggaggatcgcttgagccctggaagtcgaggctgcagtgggctatgattgtggcactgcactccagcctgggtgacagagctgagactctctataaaaaaaaaaaaaaaaaaaaaaaaaccttacctaacaacatacaagctactattttcctttcctcttgcctttcgtttttttttagatagaatcttgctgtgtcacccaagctggagtgcagcggttagatggaatctcgctctgtcacccaagatggagtgcagcggcgcaatctcggctcactgcaacctccacctcctgggttcaagtgattctcctgcctcagcctcttgagtagctgggattacaggcgctcgcccccatgcccagctaatttttgtatttttagtagagaccgggtttcaccatgttggtcaggctggtctcgaattcctgacctcaagtgatccacccacctcagcctcccaaagtgctaggatttacaggcgtaagccaccgtgcccagcctacaaactattttcatttagctacccactcttttcttcaccaaacctgggcttgcccccaggaagaatccagttcaggaagagaactaagtactttatgccctgggaggcctatgtcactgtgaccagggaaaaaagggccagctaggcctggagcaagaagctggccttttattgttggaattcaagaccagttgcaatcactctgtggggttttgcagcccaccaaaccccttgaaggcatacatttcagggccagtgtgggcccctctcttcctggggaagccacagcaactcgatctttaatatgcacatgaatttgctgcagatcttggaaaatgcagtgtgactcagtaggtctgggtctgcatttctagcaaccttccaggttgatgccagtgctgcgaatctgcagttgggataacgaacccacccgagtatgcccacgactttcctagttttggcactgaaagttctgcatccagggaaaccaggacagttggtcgatgtatccaaagaccacactttgaatggcaaggtcaaagcaaggaagcatgtgctgtttgtactgagtttcatagttcctcccactggagtccctggaataatcctcttgtcctgataaagaactgtgactctttacgctctagaaaggccacctgactccaagcctcagctcttcagggtagatgctggttttggggggcctgaagcttatctaatcttagtggctctcttaagaaaaaatttgaccaggcgcagtggctcacggcctgtaatcccagcaatttgggaggctgaggtgggtggatcacctgaggtcaggagttcgagaccagcctggccaacatggcgaaaccccgtctctactaaaaatacaaaaatttagctgggcgtggtggcgggtgcctgtaatcccagctactcaggacgctgaggcaggagaatcacttgaacccagaaggcgggggttgcagtgagctgagatcacactgttgcactccagcctgggcaacaagagtgaaactccatctcaaaaaaacaaaaagaaaagaaaaaatttaaaatatctttgttttgcaaattttagaaaacatataaccatgtgaacagagtaaatttccctctgtctctttggcctaaggccaaacaggtgctcgcatcttccttctgggaaaatggtgctgggtgtctcagtggccagtgactgccacttctgcaagatgaccaccaggtggcagtcgatttacacagcccccttcacatgcccaccctctcccgcctggccacctccagaaatttccaactcttcctccagctggtgcagcccattaatccaacaaattaatctatgctgtgataatgggcataaggagttcatgtgcttctctctcaatagcatatttgccatttaatggaaatgctgagagattgtttttaaaaccagataaagaatgctaatggaggcgttccaggcactctgttggatcacggatcactttggtgatgtttttgagcaagtgggcccttctgtgctccacagattgcatctgtgcaaaggtgctgcatcttaaccccatccccctgcatcccaacccgaccccaccatgcttagtgtttaggtatcatctcgggagctcagctgcctggattcatatgcaggtactaccacctcttactgagggtagatgttgagtaaggactttaacatctctgtgtgaaacgcacgtagtaatactgatttcatataattgttgtgaaggattcggtaaagtaccctaggagtgtgtggcacacaataaacactcgataaagagctaccatcttcataccacaccttgcctgcctccttcattcttcagagcaaattctcctgtttcccccccagaccctatctccaaccagttgcttcaagaaaacaaagggagaattgagaccccagcatggtaataaccaggcaattcttgtgggcacagcgttttccagacccatgatcgccttttaagttggggctgatccctgaggacatcaaagcatcatcaagatagggaaggggccctggctggaccagacttcagatagcccagctctgcatttttgcagaggataaatctgcaagtatcgccttgtggataccaggagttcagcacttgcagatgagcaagcaatgtgagggtaggtggctaaggcagtcatctggtccagcctgtccctgcccctggacccatagccatctttaaccaggcgtcagcggctccagcagaggcttcatctcctgcactccttgttagacctggtaagcattctccctctctttctctctctgattacaatcatctccagtgtcatctacactaacaggtaaaatggtgtaagggtctcaaacttgctgcatattagaagcacctgggattttacaatctgattctcaggctaaatcccaaaccaattaaatcagaatctctgggaatgagacccacacatcagaaatgattctaacgtacagcaagtttgagaaccagtgttctagagcagtgtttctctagctttaatgtgcatagaagtcacctgaagagcttgttaaaatgcgaattctgatccagtgaggctggggcagagcctgagattctttttctaacaagctcctaggtaataatgaatgttgctggtccatagaccaagctgtgagtggtcagattgtggaactgtggttctcaaatttgagcatgtatcagaatgatctgaaggtcttgttaaaatgcacgccagtttccgattcagatctggaatggggcctgataatacgcattcctaacaagttcccagggaatggcgatgctgctggtccacagggcacactttgggcagcaggggtgtagaggaggcaacacaagttttggagtcaggcagccctcagcctccttttctggcctcatgacactctagctctgtgatcttggataagttacttaacctctctgaactgtaattatactatctgtaaagtgatcgttattgggcaagatcaaatgagctaaaacacctaacacattgccaagtgggctggtcctcaagcttgacggcagatttaattaccttgggagctttttttaaaaaacaaacaaaaaacccatagttgatttaattggtctacggtactgaacatcaggacgttttttctttaatagagatgaggtcttgctctgtcacccaggctggagtgcggtggctcaattatagctcactgtaatgtcaaattcctgacctcaaacaatcctcccactttggcctcccaaagtgctgggattacaggcatgaaccacaagggcgggccaggatctatttttttaattgagacagggtcttgctctgtcacccaggctggagtgcagtggcatgatcacagctcactgcagcctcgacctcctgggctcaagcgatcctcccccctcaccctcccgtgtagctgggattacacatgtgtgccaccaacccagctattttttttttttttttttttttgtagagatgtggggggttgggggatgggtctcacttcgttgcccaggctggtcttgaactcctggcctcaagcgatcctgctgcctcgacctgtcaaagtgctgggattctaagtgtaagccactgagcctggtcttggccaggattttttttaaagctactcaagtaattctgtgcagccagtgctaggtactggcctggtaccatggttcccaaactgtggtgtgcatcagaatcacaggttgctgggctgcacccccagagtttctgactcagtaggtctcggatgggactgagaattggcatttggaacagcttcccaggcaatgaataccacgcagagaaccagggctggaggataatcctggtttgctcaggacagctcatgtggagcgtcaccctgtcccaggtgtgccactttacaagcccccctgggtctgactgggagtggggccagaccctgatgggtggggaggcccctgcaggagtgcaggaggcacagttgttgtcagggaagagagagggtgaggtcactgagctgaaacatggcatcaggggcaagagaggcagccttggcaacagtgacccagagcccaggagtaagatgtgtggttggaacccctaggaggccgttagctcaacacaaggaaaaacttcgaccttgagaactgccctgtctggaaacggcaccagcttcctcttctggcagcgagggccctgtccctgtggtggagggcggggtagtcctgctgagctggaggaggaggaggaaggagagatgtatcaactggggcgatctctgagttccctttgaagtctgaaattgcacttccctgcaacctccagtctgcctttaatccagaagctgtttatttagggaggtggccgtctggagctttctcaacagactggctttccccatggtgtttcccttgcctgatacagcaagcggtttacagtcctgggccaaacaggaaggcgacagcgctagacgcagccggcaggtccgcaaggttgaggtgcagcggtgccgcaggtgtcacctcgagagtgcagtcggagagcgccgcgggtgaatgggccaggcaaggcaggggtaccctagggatgcgacgcggggctcctggggacaaaccctgccccaggccgggagggaggagggagcaggagggtccagcccacgccgctggccacatcagagcaccaagagaacaccaactgtttattacaggaattcctatgaaacagctccaagaaaaaacccacacataggaggaaaaaaaataacaaagcaacactcaacagacatggggctggggcttcccccacagtgcgccgggtcctggcgcggggaaggctcagagacccgtcgagaactcgagctggggtaccgaggcactcctcggagacccccccccctccctccagggccccaggcctggcgcggggagcagcggagggggcgaccgctcctcggcagggccccccgagccagcgtcccggccccgcgcgcgtttccaaacttggtcacgctcggcggcggctgcgcgtcccggccctccccaagctcggcgttgcgagtccgggcagggtgggcgggacgaggtgcgatcgccggctcgccttcgctacgcccttgtgatcttggggccacggaggccaccagggcccggccaaggatcggatgccactcccaacctcccagagccgcgccgaagcctcgtgcctgcccaggcttcccggctctccggaaggtctgcgcgctcccatgtccagggcggggccacgggctgggcagcctccctccccgtggcagtggtcagtgccgtgtaagcgttcctagaatcagagttctcctcctcagatcacccgcccttctcaggggcacccagcaagcccttatgccctaggcgctcacccaggctggcggcctttccgccttgctctttagccctgcacctgctcaaaggggtcactccaggacccaccgctgcccaccctcggacagcagggcttccagtccagctggggagtcagagcccctgtgagcccctactgtggtgtgactccagaactggcttttgtctgctgccaaattaaagaccctgcctccccagagtcctccagctccagggtggccaccctccccatccctgctgggtgaccgggagctgctgggagtgagcccatccctaacagcagcagcctgatgaggccagacggggcagggcagtcggcagatgctttgcagtagcccatagctcctcagagttcctgggggactggccagggacctcccacccaggctgggtgcagggctcgtgtgctgggccagcagccccgggggaaggctgagatacaggaggacatggaagggaagggcacaagtgcccggagggagctgaggaagggggaccagaagggagctgaggaaagggggtcaggcagagtctgtgacaggagagatagagaacggacggaggcagagactccaccttcaggccaaagagcctctggtgggggtcatcttgcccttttccatattccaacttttatctgctttctggatttttttttttttaaagggaggttggttcctgcatttccactctttgaccataggaacgcctggctacaaaaggggctgtaattggctgctgcctataggggccccaggtccttcctccaattgcaaggcagcaactccgaagttctaagtcccatggaaagtggcagtggttgggctggactgtggctggaggatcaccgggcctcggttctcaagcaccatctgtctggctgcagctgggcccttcagctgggggccagtgttgctttccagctgcccccaccgggtcagatcatctctggcaaggaagagctgctggcatctggtaggggaaaaaagggatgggaggaatctttttcaaaggagcccaatggtctttcctggtcactggttcctggagagacagttttgggagaagttactaaagacgtaagccctctcctttttccagggactcgaggtcaaccgtagaactctgcctgggtcatccccccattcaaattcctagaaccattccagcttgcccagctgcagggactctggcagcaggagatggagtgaaggaatggaatcccggggtgaagcagctgtaggggagggcttcaacgtgggagggtacctggcccattctaatacgtcatagctcaggggagctaggccacaaagacctgtaggtggagaaaagtaaactgggggcagaacttggtaggactcagacaccaggctgaagagttcctaagactttactcagaagactcattcaggccaggcgcagtggctcacgcctgtaatctcagcactttg[134 bp omitted]gaggcaggagaatggcttgaacttgagaaggggaggttgcagtgagtggagattgcaccactgcactctagcctgggcaacagagcgagactccatctcaaaaaaaaaaaaaaaaagaaagaaaagaaaaagaaaaaaaaagattcattcaaagagcacaggaaaaatggaactaaagtggtgttttggtggtgggataatcagagtaggtaggggcagtgaagagaacagggctgtgacctaggtgatgagcatctatcagggtggtaatggaaggaatagaaaagagaatgaaagggggcagtcaggaggagagactgagttgctatccaaggctgaaaagaaaatcttgggtgcagctggggacacgaagcagctctggaagcctaactgcgatggagattcagatgtaggagccagatgcgcagaagtgttgctggtgctataaaagagggcggaggcactgccagagtgggcagtgagaagacttcgaagagggtcaagggcagagcaacaaggagagccagtatttagggagtgggcggagcaacaggagccaggagagaggaaggagaacctggcttcctggggtcacaggagccaagggagggcagcttcaggagagatcaggggagtgcgtgtggaagagcaccataagaatgcagaagatgctaaggccctgagctgctgggtgacctccgagtcaatccgagtgatgggaggggctgtcagcctgcagtggatgaaggaggatggcagggaagactcaaggacccttggtgtttaaggggaggaggaggaggatgtcaacttgcagaaggagctggaaggggacaagctggaagtcctaggacagaaataaatgatgaggtgcaggtacggtggctcacacctgtaatcctagcactttgggaggtccaggcgggcaggtcacctggggtcagatgttcgaaaccagcctggccacatggcaaaaatccatctctactaaaaatacaaaaacaaattagccaggcaagatagtgggtgcctataatcccagctactcgggaggctgaggcaggagaatcgcttgaacctgagaggtgaaggttgcaatgagccaagattgtgccactgcactccagcctgggcaacagagcgagactctgtctcaaaatgaatgaatgaatgaatgaatgaatgaatgatgagcaagtttctgatgtaggggtggtttggacaggacccgttctccctggggaccagtaggaaggagaagggcgtggagatagtagcagcgtggggtgacagtggaggcgattccccggcaggctctatctgggcattccaggacagtgggaagtgggccgcggctttgtgtttgaggaaagcctgaggggaatagaaggggctgcagtgcctggtgggagatgtggtagggagtcaggtggagtgggtgtgggggccagctgcccaggcagagaggagagggcacttgtatttacttgttcccggtttccctccattgtgactatcctgaggcaagtgagtatttctccatcgtctgacacagggccatacctgccacaccatcaactcaagaaagccttgtagatgctgcccactgggaccaaacaagtggctggggaaggccgggcagcttcccctctcccatggtaaacgggggctggaaaagggacagctgtcttggccaactcctggaggaggccttggtattttctttttctccccaagagggtgcacaggaagcgaggaggagaaatggcttggagccctggggcttcagccagaaaccgctgcctcaggagggtttcctcatcctggtgtggcagatcccagcccacccaacccaagcagggggctggagagagttgtgtgtgtgcacagccgggttgagaccacctcagtttttctttttcttttttttttttttttgagatgaagtttcactcttgtcgcccaggctggtgtgcaatggcgcgatctcagctcactgccacctccgcctcccagattcaagtgattctcctgcctcagcctcccaagtagctgggattacaggcgcttgccaccacgccaggctaatttttgtatttttagcagagacagggtttcaccatgttggccaggctggtctcgaactcctgacctcagctgatccacccaccttggcctcccaaagtgctgggattacaggcatgggacaccgtgcccagccagtttttcttaaatcatcctctcagtgtgctacgtgtgtcctggactgtcttctcaactggactgtaaactcttcaaggtcaaagctgattttgttttcctgttctcagcatctgtcataggcaggtgtgctcatcttttgtcaaatgaataaataaccaaaaaagacatgcaatgaactagttcccacgcccgtgtccctgccgcaactatgagggaagacacgtggggcctgtgctacccagttgcctgagcccagcgcctctggacacctgggaggacatgtggggtgcatagtgtggggggccctggccttgggcagtccctgggttgctatggctccaggccttacctcttactgtccttctcgcaggccttcctccaccttgggtgcctcctgacgcctgccccggaagtcttcatctgaaaaggagagggaagctgcctcatcctctaccctgcagggcctcgctcaggcacggcccctagactgggcaagagagctgacccgactctctctgcccccttcatttgggacccatgcagatccccccaggtagacgatgcatgggtccagggagagaggcagcaggacactcaggtgctggccagggtccaccactgagctctgagaccttggacaagttctcccctcgtctttgggcctcaaatttcctcatctataaaatgggatggaaaagctggactatctagatgacctctgaggcccttccagtccttgtttctggatgcctcctgaccctcgaatgtggcatgaggatcagggttcagctgcgggcccaggagggtctgaggcagagtcttctggcccacgtggcctttggaagggactgggtgaaagttgagaagcctctgggcccacagactgaagctgcccagtgcttggttctcaggccgagggtcccccatgggggcaggcctgtctgccacctcacacccaaaagaatattccccagaaacagtacctggcacttcatgctacaggtacacatctaggtggaagtagggctagggccccttttcaggggttgcagaaagggggaagcaatgtcgaccaagtcagggggatccatatctttgggtcacctgcccaccaaccctcagtgtgttcctccaggggacagggcgggtgctcccatgaaacacccaggaactccgctgggagatcaccgatcatagagaagttggagcttacgactcccctccagcctcaccacacgcgtggccctccacatcatccaggaggttggctgttgacgcggcagcccccagcctgccaggccattcaggaaaaccgtcccagggatgaggggacactgccctagtcctcccagtcccactgactctctgccccacccctcaaagctctggaggtacctgacacacccacctgaccccccacacccttagtactgtcccccaggctcattttcctgaggtcagtggtatggccaggccctgacactctcgcccagcttacatctctggggatggagaaacagcttcctccctgtttccctctggctgctgagcctctgctatcctaggccctgtttgagaagcatgaataggagttctgataaaaaggtggaaagccgtatttctactcgaggaagggagggccaacatgcttggagtgaggaggactcgtgcaccagttcaactagagaaatgaagggaaggtttgatattgatggaagaaccactttttctcccaagaagtacataacctcagaccaaaaaaaaagttaataggacaacttctgggcctacagaagggagacaggagctgctgccctgctccctaggcctggtccctggttggcaacgagagacgggcagtggactggtggccaagctcatggaggagaggggaggaggaagggaaggccacagagccgggttccactcccaggggagggcacagctgcagggagtccaacaggggtcttgctccatggcccttggcttccaccacccccaccagtgccaggctggaaaggatacgactgatgcttcaacaagtgtttcctctttgacttcctcattttggtcttctctgagaaggctcgggcaagttcaaacagtttcctccgggtggctgggggcagagagacctgtgagtcattctctcagcagccagcacaccagatggcctcctcccaggtgtgggaaaggccaggggaggaccaaggccccccggagagggagcagggggcaggcaagggtgggagctgaggagggagagatgacaggaatcgcagacccctgaggacgccaccccaggagcaagaggctacatcctgggtcagcctgcaggggcagcacaggacaccctgagccaggcccagggaccgcaggcggctcaagatccaagtattccctccccagctgcaacacactgcaacgcatcttggctcgctttcccgccgccaccgccttcccgcccctcccctagccacctccaaagttggttctgggatttccatgactaatccgagattttccttgaaatggagcctgaaaggatcgcagcctcattcacacatggctgtgggtctgtgtggcggggaggtgagggggagggaagggggcattcaaggctggtaggactttgtggaaagaggtcccccacccccacagaggcttagcaagggcctctctgtgcagtcagctccggccaagcctcctcgagccacagagaacgtgaacatgaggattgcggtgagggcatgtgtggcacgttatttttctgcagacatctggctcaagaggatttaaaacttaatttgtatctagactcagctgtagagggaagtgaggcaggaaggctgagggagccagcctgcgatgaaaatgtcactggttcaccaagagtcagctgcattacatgtgctgaggggctccctcactcctgggaggccacagggcctgtctcagaaaagctggggagggaagcggggcctgagtgggactcacactttcccatgtgtttcagcttgtccctgaataaggcatcttcagacacagcggggttggcgtcgccagttcctggaaggagacacctgctgaaggccggccaccgtggccagccatggccgctgtcccagccctacccacccatctgaggacaaatgcaaagaaagagcaggcttcttccctggccagaagggagtttaaagcaaggaggatgtggagttccaggagctcctctttccccttgtggactttgtttcctcctctgtaaaaatggggagggttcagcggtctactgtgtgtgcagacagccagctcgtgtgtgctcccaactgtccacgcctctgaccaactccatgtttcatgacatcaccttggtagcttgggagtatttccaccatggaggtcaccaagcactacatatcaggctcccgctgcacccagagttggctgtgaaacattcaccagcacaccaggggcctcctgcaccccgacattcatgtgacagtcaaatgaggtgctggctcagagccggcattcacctgtagcaagtcccttgtccttcctgccaggtaagcccatccattgctccctcccagccacagggtttctggctattagacaatgagtaggaatagaatgggactagtcctggagtcagaaccccaccggccacccagagtctcccgggctcgctcagcatccacttgggttttttgctggtttctgaagcccctgctctctgtcctgcaacttggttaatccccagtcaccttgcctgctaagtcccctttgagtcattctgatccatctcagcagccccggtatctctagttaattcaggatcaaggacaagaggctcctgcttaaaactcccagctgcacatctgctgagccctaagctcccagcctgctgcttatgagtcagttccacaggattttctcccttcaagctgggatcagctcagctccccatccctctgctcctccacccccaactccactgcatgatgcaaggtctattccaggcaagagcccttctccgaggtgggcagcttgtgtacatgtggggcagggggcactgactgatgaggggccactgttcgcacacaggcaccaggtcatcgttcccagctgtggctcaacccagtagtctgcgcatcccaggagcactgcagccccctcacccctatccaaccctctttcagccatcagagcttctgagcagaagggcctggccctctttacaggcaattcttacttcccaccaccttgtacacaaagctagaaattcctcttcctccaacacctagggcaaggcccaacagatggcagatattctccagctatgtcatgaatgaatgagtaaactccccagattaatcctgccctccttttttcccatgcatttgctaaaatcagtaagtcctcagctttgctagtttgttctacctgttttctgggcatttctccttacaagaccataagcttccccaggacacagaccaagacttatgagtctctgagccccaccacggggcattttggggtccttttcttcttttttttttttttggagacagggtctcactctgtcactcaagctggagtgcagtggcataatcacagctcactgcagcctcaacctcctgggctcaagtgatcctcccacctcagcctcctgagtagctgggactagaagcacaggccaatatgcccagctaatttttagtacttttttggtagagataggggggtctcattttgttgcccaggctggtcttgaactcttgggctgaagcaatccactctcctcggcctctcaaagtgttgggattataggcgtgagccaccgcacctggccatgtgtcattgactagcctacactcgaggcataggttgagagttcagccagcctatgttacttgaacacaactgtgggctctgaagcccagcagtggctggattggaaagaccccagagctgctaaatggactggatatggagatgggggcagaagcagccccgccagcctgctgaggaggcccaggccccctcccacaatctgttttttcaccctcctctcaaactccaaatatgcaaagcaaagttgggtgtgagctccccactatgcctctaggttttcttccccagaaggcaaagttacctgggacaggagaggaaaagccaaagtcgtttccgacagccacgctgctggatttagatttctgggattcgtatttcaatcgatctggaaaaggaccacattcacaggtcagggaggttagctcctgggctcccaggggcaggctgggctgggacacggtagtttgctagaggctaagtccccagaatcacacatgagcacacacgggcacccaaaatatgagtgcacacatctaccagctctcaaagaaccagcagtaaaagaaactaccgcctgacagccatctcaaatgtcagaattaaaaggactcagagagactgtagagtccaaaccccctcatttaaaaagaaaggcacggccagggatggtggctcatgcctgtaattccagcacactggaaggcta[134 bp omitted]gaggcaggagaaacacttgaacctgggaggcggaggttgcagtgagccgagattgagccactgcacttcagcctgggtgacaagagcgagactatgtctcaaaaaataaaaaataaacggaaaagccttgaggcttctagcacctttgctgcagagctggggctaaccttgggcctcagcccagccttctccctccacaacttgctcctcccccaccaacacaccatcagttacacacacaagctctcacgctgtggccgtcacagggacagagctccacagccctctcgtctcctctaccccaaacgcactcccaccctgcaggggaaaggcagccaggctagggagcagggtctccaacccagagacaacccaaatacctgcaaagttccagagcccctgctctaaagtcttccactcaagagcctcccccgccctggccttcatgaacccagtcgttctgtttccggagctccagacacatcacgcctgccttggggctggggctctgtgaggaggggcagtgctcttctccctgctgccttgtgccaaggccagtgcctggcacagagcaggtgtgcaaagggaagaaggcctaagagtgcacatccttcttcctctgagtcccgagggagaaaggggtgggctagtgacccaggtccccataggcagaattctgaggctcccatgggataacttggtgggagtcatgcctcaataggacagaaagcacctggccccctcagcccccagctcagtgttttcctgagccccaaggctaaagccagcatcacctcccttcttcagccagggagaagtggctgcaggcgctgcccacctctctccagagcgaggaggaagtcgcggttccgttgcagctccttcatgaactcctcgttctgcaggaaaagcgcgatcctctcgtcctccaggtactgcttccagcggctctcctggtctccgggccctggcccagccatggcaggtggacatccctctccactcccaggcttggggcccccagcgttaccctgaggagggaagcgagcatgttgaatgtgtacacacaagggtacatgttgcacaaacgtccacatccctctggttgcacacatgccctgtccaacatcctccagccctcacctgaggctcacacctcctaatggaacctggttgcgagccaaaatccaacggacaggtcagagccattgctgcaggggacacagcagtagcctaaaaactatttttcccccacgccacagaccacctcataccttcatctacaacctgaacagtcctgaaaacaaatctgcagactgtggaacagcctatacgtcaattcccaaactcaaccctctccctgcaccagcagcctcagggtggacctgccccgctgtggggcaccttggggcatgccaacatctagcaagaagcagcctctggccctttcccaagggaggaaggggggtgctctggccctccaccattggccaccccatgcccgcctctctccagcctgaggtgactgctgcagcagacagcctccttaggctgtcaccttccctggatagaacaggaaacctccaggcccaggcaggaagtgaggctttcagttcagcattcctgccctacgaacccagggcaacagaaatagctcagcctgggtttaaacatcaggaagtaaaactggctggcacaaattgtgtgggcaaagagagatgctggacaagcaggtgggagtggaaggcgggggcggcccctgttacctgtatgctgtccagctgctggggcaggatgcggagaaagtcatccggaaggttgcccagcagtggtgggttccagttccgatagcgtctctggcttgtaggggctccagagcccagcgcgtcgatactaggggatggcaggtgacagggaagaggaagtcattaagcccaaccccaggtctcctggccccatcacaccaggtcctcaggcaggtcggatcctgctcagagattcccatggcctccactgcctccagaacaaaggcccgtcactctgtctcatcactggagatgtctccaccagcctcagcgaactccccagccattcatgctctccagtcactcagtgcccttccaggtctctggacctacagagctgtctgtccacggtgcacatgtggaactctgtggatttagccatagatgtttacaaatgtcccctaaagacagcagggatcgcatcctttcatgcttctatcctagcacctacacagtgccaggctcatggtgctgagtgacaggtatggtccaaaggaacagacacataagccaccaacagcacagcctgctgcatgctggtttgctgaggaaggggcatatggggacgccaggatccctacagagggtaaagcagatctgagctccagttctggctcaaccaccagccggcagggtagtcttaggtgggcccctgttccctctagggctcggtttccttatctagaaactgctgcctccctgcccaggtgctggggagcccctcaggaggccgtgtcctgagcaatgttctgaaaacgtgcgtggagatgtgagtgtggaagggatctcgctctcagggtgctctggggccgctctttccaggcccgttgtgtgtgtggcaggagctctgtgccatggcagagccaacagctgggcaaggcagtagaggaagagggggtggcacacaccctccctgacccccaggctcccgccctaccgccctgggcctgagggcagctcggagcccggccaggaggtccccacagctccatggcagcctgcagcgtggcaaccgcaggacacgtgttccgctgaatcaggaaaacggcacactgagaaggcagccgagggccgggcggtgggggctgctctagctctcgggcctggctttgatttggtcttcagctctaggaatcccgcccgccccctcactggaggggagcttttccgggctgccgctgactatggaaataacttcctttccttttctatttcgggcgggtggccggcggcgggggcgaggggaaggggcgggggcggcagcagaagggataaccagctgctaagtgcctggtgggagctcagctcttgcagactggagccaagggaaccccagcacgcctcgtccaccctctccctgcacagacacagggggagagggaatggtctggagagcagcttgcatcacaacccgggactcccattcctaggccaaatttttttctacatcactgccaccttctgtcactgttggaggcttcatttttctccaaaggccagagatggggagagaggaagcctcatctctaagggactcgcagaccaccccaggctacagcagggagggaccctcgccaggggtattaccagttcttgaggtctcagggtcttcatctgggacatgggtgcccacccccaatttaaccacacctcggagccacccaggaaagcagtggagggagaacctcagaggtgcacctggacccctctagccatgaagactccaagtggagaagggcacaaggtggaggaggcccctgttctcagctgagtttccttgctgctaggcctgtggtcctgaaggaaggccaggcccagccccctcccggccccttggctggcactggtagagatgaggtcagcccacagctgcgtgagccagggcacaggcagcccaggcaactccattgtggtcggaaaggaatgtcagaaatgagctgagacgcaaataaaaaaaaaaacttccaaggctgtaattttaacggaaaaacagcaggcggcctgtgtggaagggtccccggggtttcagagactgtctttcagacagatggagggaaggacagactgggggaggggaaggagggagaagctggggaggatttcccagcccagagcctctgcctctggaccccaaaactgcaacttcaagccccatcggacccccaggtttacccatggaacatcagacctgatggaaagggatttcagactcaggacttccaggtaaaatttttggtaagaactggacattgaggtccagagggggttcaagccatgtcccaggacacacacatcatccaggcaaaacctgggcccagggattgtgacatttgaagcatgctccccggggtggccctgcctctctgtgccctaggaggccaatacccacgctcccaaactctgccccatctgcaggttctcggcaccccagtgactggaggtagcagatgggggccaggccattcccccactcaaatctgatctccctcagcagccaaaggaagattcctaaaacacgaacctgatcgtgtcgctctccaggttaaggcccttgaatggctccccgctgtctgcaagagaagacggaagctccctggagggccacagggcctttgatctgcttgcctttccagcctcacccgccgttaggtacttccaggaggtctccagatgagccctctttcctgcctccaggcctctgcaagtgctccttcctttgcctgagcgcctccctgtcctctgcttctccacattactgccaatgtggccttcaggtcacagcctggacatcagtttctcctggcagccttccctgcccccgtgtcttcggcttccctagaccctgatctccttggcagtgtgtgggcaaacaggcagcaccgtattcacctccacatcacacacatggctcagcacgtggttcacacacatagttcaggagtgctgtactcaccacctcatcatacacatggctcagcacctgcgtatggcaggcaatcagtaaatgctggaaatgaatgtcctggatggagggactggacaaggcactggagatggcctagaggcccaggtctagcagagccatcctggggcaaagggatctgtgcctctactgaacactggcctctgggggaagcctcgcccctggtctcaatgttagagctaaacttagaagccagccagtgtagctgggggacaggaaggagcagtaaaccactgattataggtctggtctatacctgggtctgtgctaagtgctccacacacatctcattcaatcctcctaacagtgctaaggtggaaattactattcccatttcaggtgaggcaaacgaagctcagagaggttaagcaatgagccaaaggccacattgcaaaggtgcctgaagaattctaagctaggcagctgaagaaaggggtggggagaacagaccgcttctgtctgactccacaagtcaagttctcctcagggcatccactcccagcccagcaaagccttccatttcctgagttaggctccagaacctcaagcaagagcagtaacttatctaaagtccacagggtctcctaagccttggtctggtgctgaggttaccttgcccccaagtggggctcccatcaccaccctggcccccacccacagcaggctgaacacccagccagagtagggagggaggatgtggcatggatatccataccacatttatactgggattttcagccaagcgtgacggtatgccctgtagtcccagctatttgggaggctgaggcgggaggactgctagagcccaggagttcaaattcaccatgggcaacatagtgagaccctgtttctatttaaagaaaaaaaaatcctttctcttatggcctcagttttcccttctgaaaataggtggaaccactctgcctagcagaaactgaactttttgcaaaagtgtattggaatattaaaaaaaaaaaaaaaggtgggggtggggataggcccggtggcttatatctgcaatcccagcactttgagaggccgaggtgggcgaatcacctgagatcaggagtctgagaccagcctggcaacatggtgaaaccccgtctctactaaaatacaaaagttagccgggtgtggtggcacacatctgtaatcccagctactcgggaggctgaggcagaagaatcacttgaacctgggaggcggaggttgcagtgaacagagataatcccagtgcactccagcctggatgacagagtgagactccgactcaaaaaaaaaaaaaaaaaaagtcaaagaaaggaaaatcatttagcccagggctctgtgatctatcccaggctgcaagtcctgcctaggtctcacccagacccacccactcattccccacctcccactccagtacagcctgccagctcctggtaccactcgtgacaaagatcccagctctgttcctgtccctgactcaaaacacttccctccctcctcccctcagtaactttctaggactctatgagctccgtaagctgcaatcacagagacttttctcattcgggaggtgacaggacacagcagtgaagagtgattagctttaagtcagaatgacctggattcgaactccagctcttagtcttggggaagttatgaaatctctcaaggctcagtttcctcgtccataaataggggtgatgacaacagtgcccgcctctgcattaaatgtgatggtgtaggtaaagaacctgctccgtttctggcattggaagggtgcttagtcaatgctagctacacttgtatgataacagagttcaccactgctctggggctgttctggggagaagggaagatctaactgggacaggtgccctgtcccatcatctccccaccccctcaccactccaggcctgagccattctaagaaacagcagctctagggcaaagaggtcacaccccagctccagcagccccagcacaaatgtggagcccagaaaaacaagcaccccggagacccatgggatcttcctggcaactaccttgattatttatttatttatttatttatttatttatttatttactgagagtctcactctgtcacccaggctggagtgcagtggcaccatcttggctcactgcaacctccgcctccggggttcaagcggttctcctgcctcagcctcccaagtagatggaattacaggcatgcgccaccacccctggctaatctttgtatttttagtagagatggggtttcaccatgttggccagactggtcttgaactactgacctcaagtgatccacccaccttggcctcccaaagtgctgggattacagatgtgagccactgtgcccagcctagcttcattttaagcttccaaattacagagtctctaacctggaagaagtttccagggaccttgcagtctacctccctgcctccagttatcaaactaccttaatgaaagagacttgctctcattgcttaaaaatcctcacaatatccctagcccaaggatggcagctagccattccatcaattactgatgactggctgggaatgctgtgttctgtgttaaggaggatctgaggctctgtcttgactcagcaggaaagagcacagtgatgaatcagccatgtttgctgtgggcttgggaggggaagtgccaatacacattccctgtttgtcattcctactctggcatctcccttgactataagctcccagaaagcagaggctgagctttacttaactctgtgtcccatatggtaccagacataccgcctagcctagagtaggaatttaggaaatgtttgctcttgcaatccttacattttgcaagttctccttggtatctagctaaaatgtctcttgctgcagtagaagcctgttctttgaaatatactgagcagtccagccaagtttcgtgttgtttgtacacagccccagccactgatcctcttccctgccaccctgtgctctgagacatgacagattctcaccggggaggcggagtcgggggagccagagggtagggccggtcgaacacgtgcatgtggtaggctggcggggagtacacaggtgggggctcttcatccgagctatcaggttccaaagtcctttccaagatctaaatcagaggcaacagagaaagaaatattaatcatccctccttgaatttaaataccattcagacaaaatcaagtgtgggagggcaggtataataaaggaactctgtgtgttgctagtgggagtgtaaatcgatacaatcaccactttagaaaactgcctttttgaaaaagctaaacacatggctacctctgaccctccagttctggcaactccacagacatcaaagtgtatgtccccaaaagaatgttcacagcagcattctccctccatgtgcagttcaaatacaggcagaaacaaatacacagtggtaagggtcagggcggtgtgccctctgtggagcgggtaagggtgggaacagataccaggggcactccaggttctggggatgatggttattgagctggtgctgataatgtggaatattcgcactgtgaaactccaccgagctgcatgcgtgtgactcatgtgctcctgtacccatgctattctttgatgataacatctttcataccttctctcaaagtacctccacgtctctgatctcatcttaacctcgaacaacctggcgctgtaggatatggctcattaccccatttgacacagaaggaaactgaggccgaggctaagtgacatggcaaaagccacacgctttttagaactgagtcttcaacttggaccacaagggtccctccttcaggcacactggctgcacactcaggttggactctcagggcggagagtagcaaggggagtgcccgggatgcctgctctccttcccaagctcttgtctttatccaggagccaagaagagggccagggagaggccaaggactgggcaaagtctggggtcctgctccactgaccgacttagattcttccccagaagcccagagaggagtttggggcagctaaacacatggctacctctgaccctccagttctggcacactccgcagacatcaaagtatatgttctcctgcctcggcctcccaagtagatggaattacaggcgtgcgccaccacccctggctaatctttgtatttttagtagagatggggtttcaccatgttggccaggctggtcttgaactcctgatccaccataggggcggcccctgactgggagatccctcaccacacagcccaacctggcctacaccttcgcctcccgctcactccccacaactctgttcccatctcctccaagatcaaagaatatgggaggagctcagaggctgtgaatctcaggtgccccagagcccccagacctcaggtgagtttgcagaagtcaccataataatgctgcctgtataagcctgggctgggccaggcctcactggtacatctctgctcttgagaccagccatgcccagcacacacagcctcccaggggcacctggtgggtagggaagtgagcctgtgcatgtgagcacacatacacacacacgcgcacatgcacacacatgcacacgtgcactctgcagtgctctgcgcttacatagctagctaaacccaaggaggcctcccgccctggaatgcactaacgttctttcctttgaggccaaaagtatttaaacagatgcttttgcaggaaaggaagaatgtagtgcttggcaggccactgctctgcttaccctaaatttccacaagaaaggaaaaaagagagagaacactgtaagcgctgctcctgttccctggcgactctctggtgcctggcacaggacagtgacccagcaggtacctggtgcattctgagaacttgctgctgctgtcccccagcccaggcaccctgtttcccagacccctcttctctgagggatagggctttgggctgcagccttgaggccagcagtggtgggtctcagtggctggcctgggctattcccactgatatgggtcagagtgaggtgggtgagcaggggaggagagcgcagtagaaactgtcccctaaaggaagctgcttggggtttcccctgaccatggctagtggcagtcagccccccagactcagggcaatcagccctccccagccacaccaggaggccccctcctgctcctctgtgcagcctcccagggcagcaagaccagacagacgttcatcagagcctcctggagaggacttgggaaacacagagaagacaggcggccggccaggcaagctccagaatgcagggcccgagtcccaaggagagtaaccccagcagcactgctggcctccctggcctctccctcccactgccaccgccacaaagaggttgttcttctggctctaaaggtgctgaagtttttgggctctgcagcctcctggcttaactcattgtgggtgatggatgcctgccaggtgctccagggggcagggtctaggccatttatctgacaggagatacttctccatggcaaggatacccctcgggccagcccaccatccatcagcccccagaaagggtttttttttccagtcagcagttattgtcattccagctgtggctcataaattttccgaagcactttccgctggctcaggagctgcctgcctatgggcccaggcagagttccaaaggtggggggttggggagactgccaagggaggggaggggtaccgggagggggctcaatttggagagcaagattcttagaaaaacagaagtgcacacacagcaagggcctacctagggggtggtgaagccttgcagaggtctataggactgtgggggccatggacaaaggagaaaatactaccctacctgccagactgtcagggcaaatcagactgcagaaagggtcagagcttgcagagagctttccttccagttcacacttaaagcatatacagttgactctcaaataacaagagtttgaactgcgtgggtccacttataggtagattttcttccacctccaccacccctgagacagcaaaaccaacccctcctgtccctcctcctcagcctactcaatgtgagaagatgaggatgaagccctttacgatgatctacttccacttaatgagtagaaaatatattttgtcttgcttatgattttcttaacattttcttgtctctagcttactttattgtaggaatacagtatatgatacatacaacacacaaaatatatgttagtcgactgtttatgttaaggcttgagttaaggcttgaggtcaacgataggctattagcagtcaatttctgggaaaatcaaaagttatattaaaaagtggatttttgactgcaaggggaggattcactgcccctaacccctgcattgttcaatggtcaactgtatctgcagacacacacatacatacgcatactctcactctctctctctccttctttctacaaagaggatccatattttccaatattccttccaccacctactccaagcagatcaaaggagtggtctcccaaggagagagacaatagaaaactgtacaaagacagcagcaacacgtactcattcaacaaacactccctgagtgcttgctatgtgcgtggattgtcctgggtgctgcagatgacacagggatgagccagatgtcttggccaacagagcttttccacctctaggggaagtctcagcagcacccactaaggaggaaaagcaaggagactttgccctgcaggatggctgatgaacaagggtaataataatgccacagcacaaagtttgtgaggattagaagagatgacacatcgggccaggtgcagtggctcatgcctgtaatcccaatactttgggaggccgaggcgggcagatcacctgaggtcaggagttcgagaccagcctggccaacatggtgaaaccccatctctactaaaactacaaaattagccggtcatgatggcacatgcatgtagtcccagctactcgagaggctgaggcaggagaatcgcttgaacctgggaggtggaggttgcagtgaaccaagatcgcgccattgcactccagcctgggcgacagagcaagactctgtctcaaaaaaacaaaaaaacaaacaaaaaaagaagatatgatacatctaaagcacttaggatgatgcctggcacgggtcgggactcaataaagagtggagttaaatcctgctgggtcctggtcttgtccatggctgcatgtcccagatggccctgtggacaacacccctctgattaacaggctctgtgtgcctcatccttctgcaccaagcacctcaggctctgctgatactgggtggccagatgtccactgaactcgggtgggactggaaaggactcacaacctccagcaggtgggtactgatgcagtacgcaggtcccctctctccagccacttccctggagagactgcttggctatggctcactactgtttccatcaggccacagtcagagggatttaactggcaagtctgattcctcactccctttccgtggctatgctcccaggatacagccgcactctttttcttttctttttttttttttttttttttttgagacggagccttgttctgtcacccaggctggagtgcagtggcatgatctcggctcactgcaacctctgcctcccgggttcaggcgattctcctgcctcagcctcccgagtagctgggactacaggtgcgcaccaccacgcctggctaatttttgtatttttagtagagatggggtt[133 bp omitted]ctttgtcaacctcattgatctcctctcactctaggaccctgacagatggtcctgctgccagttccctagccagtgaggcactatttcacctcccagactctgcacaagctgttccctttgcctgcacacccttcccccggcttcactcttcctttgggtctcagcttagggtttcggcttagccatcgcttcctctgggaagtcactcctttctgctgcttccacgtctccatcgagcacttaccactctggccgtcagtacccgactcgcgcttctagtccacactggactgtgagctccaggagggcagaaatttggtctgacttggccactagcggactctacgcctgatgtggagttcagtatgttggggtggggcccaggcacctgcatttttaacaagcaccttgattctgatgcctcctgactcagggtctagtgccacgtctcgcacaccactgagtgggcgctcagtgtttgttgaatgactgcatgatttctgcccataaaataaggtgactgacggatggtacttttccctaggggaagtaaggctgcttgctaattagaacccagatagcggagtaacccaggtcctcttagaggttccagtggtggttggaattacccgggccgtgcccctacctccggggggatgctgtcctccagtggtggttggaattacccgggctgcgcccctacctccggggggatgctgtcctccgagtcggagctgtcctcatagacgccgccgctgctgccaccgccctccaggttcatctgcagcagctggtcgatggtggcgtccacagcgccgctgttggcgcgcagcacgcattcgatgatgtcgtaatccatgttggggaacatggtcttgaagtcgtccatggcctggttgaactccaggcggcgcacctggcgggcaggccggctgttgttgagctcctggggggcggccgtgcctcccccgcccccgcgtgccccggcggtgccacccccgccgctgccgctgctgctccggcggaacaggctggtcattttgcggagccgcttggggaaaatgtttctagccggccgcaaagccccttccccagggtctttccgccgtcagccgcttacttgccctgcggtctcgggcagctcactcctgcgcctcctcctccccgggtagccaggcagcaatgggctgccaagagctccgggttaggagagtacgggcgcggggccccaggcagcccttggagagcggtcctcgcggggcggtggcatgcgggaccgggccgtgctggggctgggcggccggtcatccacacccccggtgcatcctggcaccggtttcacggatggtcccacctgaaaccgaaagagatggagtcagggccgaggctaacaaaacatgagctcagggtggcggccaagggctactaagaaatgagggcagggaaccgcgacccctaccacgggcaagggaggcttgcttcttcctcatgctttctccccggcttcagtaatgaaatccccacagttctttactagcacaggacagccaccagttagcaagggattcctccgacccaggtgccatcctaagtgctctatgtgggccaactcatgacaatactgtaaggtatgtgctagtatgcccatgttgcagatgggaaaagtgaggtatagacgctgagttagtggaggagccaggatttgaatctgggacatatggccctcaagtcactggtctctaccattacacatactgccaaagacccctgaagacctgagtgaggcaggaggggctctttaaagatgtcctgcctctctgatctctagtccctgttctcatcttcccacatcactgccccaacatcgtggtcccaccaccagggcaggaatcttgtgcagagctccatcgaaccccggggacagcagtgatgagaagcgggaccctccagtgtcaccgggagcttccagcctgagagaggaaacagggtttcatccttgcagagcctcgggctaataggggaggcccagttcccactcttggaaaactcatgtcaggccctaaaactcagtccattcccctgagaagcaccagcccaaaagagagatgcaaggccattgtcaacccctggagttcattttccttaccccaatgtcaggccgacatgttttatttatatcacagacacgtttgttcttatggaacactcagtgtccttacatatttttaaaaattctagaagttttttctcaaagttgtcttgagaaaccatatacatcataaattctggttgtttttttttttttttttttgagacggagtctcgctctgtcacccaggctggagtgcagcggcacgatctcggttcactgcaaactccgcttcccgggttcacaccattctcctgcctcagcctcccgagtagctgggactacaggcgcccgccaccac[186 bp omitted]cccagccaatgtgtgtccctcagcccccagggtcagcacagtgtcctgacaacatgtataggtggaactgaaaatcaagcacaatgagggaccttaatctgccacagaaaaccacccggcccactcaaacccaggcatgtaaatcactgccaaggttgcatttctgttagcacagaccactgggaatggaatgcgcctaaacaccaacttctgacagtggcagctttattttaagggacaattccatcaaataatatccttgagtttgatgaaacaggtgcaaacttgttttcacttttctaggacttggagtcacaatcttaacagctgatacagaaatttttttttttttttcggtctcactttgtcgcccaggctggagtacagtgctgtgatcttggttcactgcaacctctgcctcccaggttcaagcagttctcctgcctcagcctctcgagtagctgggactacaggtacacgccaccacgcctggctttttttttttttttttttttgtatttttaatacagatggggttttgccatgttggtcaggctgttctcaaactcctgacgtcaggtgatctgcccaccttggtctcccaaagtgctgggattacaggcatgagcttcaatgcttggccaagatgtttttgtgagtacatcaacccctgagaaaatctgttca[134 bp omitted]ctccaccttccaggttcaagcaagtctcccatctcagcctcctgagtagctgggactacaggcacgtgccaccacgcttggtgctaatttttgtatttttaatggaaatggggttttaccatg[136 bp omitted]tttactaaaatgtaatcaaaccataaatcctatgcaactagttttttccacataataagatattgtggccatcttcccatgtcagaatacgtagggctacgccatcatttttagtgcctgagtagcattctgttgactgagtgaagcatgatttataatccaactccctctaccccatctcttcccagatgagcaagtcagagcccagagacgcccaagccatttcacaagaagacacagaggggtgacttcaaatgatcagtccaagagttttgctgtgagaaggaacataggaaggtagccaagtatgacatggcttcccatagccggctttagacaccccaacacccctacacccacatctccacgaacccacacacatcagaagagtatgcagcttcgcctgggctccaccctgacagctgcctttgtcctgggctctggggacctgccctcaagcctctaacacagacctcagggccaggaggccccagaagctgatgccttgggctactgtctgctgtcctagtgtcatcacacacaggggtcagtgacttgtgttaaggccttctggagtaaagccatcatctctctgcccctccagtaatttactaacagagatggagggacccaggtctcactctgccaaaggcaatccctcggagaaagatgacctgggccacccccaggggaggaagaaagaagatggcaagaccgacattttccccattagcagccctctggacagctccctcgggttctgggcctctctgagtgttgagaagctccagaagccttgcactcttgccacttatagggaacacgcaccagttcagacaaggcctccgcactccccagctgtgggacctcagacaagtctcccatcctctccgtggccctaagccctcatctggatgtatcccttagggggtttcaatgggaatgaaataagataatcctcagcacactgcctagaacgtggctatgctgcatttgagttatcattgccccaggaggctggtaaagagccaggagcagtgggtaaattggccaagctgccctcacaggggggatggggtagggagattctaggggggtcttccccagcacctggatgtcaatccctggaattctttcagccctctgtaaggaaatattgatcctcatggccccaggggaggctgggctggcctgggcaactggagacacagcagctcaagcagccgcttccatttggcccaagtgcaaagctttgaaagcatccttgtggggaccacaaaatgtaaaggactgacaactccagcccagccccacaccctgcctcacattacaggtgaagagcctgagacccaagtctaggagggagttgcccaaggacacacagcgagtaaaggcaaagtctagacttttctatcaaagggtggttctgtggatgaggagagtggctcagaaacagtaatgggaaacacaaggaagcagtaatgggaagcattttgattaccagaagtaccatttccacaggactctataaggtctcagagactcccaggctgcctatagttagaaccaggtggactatagaggcccccaattctcagagcactgtccctctctccccctggctaagctcagggcagagtctgaggccatggctgtggtgtgcctgggagcagggtcagagccgtccatgccaggctgccttttgcaactagcactgctcaaatgaaaagcagtttaaaatacacgaaaggattaaagcaagtaggcgacaggtttacgagcctgtgccacatgctttcacatttaatctttattacaactccatgagacaggtgttgctgtctccatttcatagctgtgggaaccatttcagagaggttgggtaaattgcccaaagtcacacagccagtatgtggagaggccagaataggaacccacttcctaagaggcaaaaaatgccaagtaaggctcacagggctatgagccaaggagcataagaaattcagccatgtgtgccccaggctcaggagactgggcacagcccagaggacatttcagcacaggaaacatgacccagacagcatggtagcaaggtctcttggctctgctccagagctggctctgtgaccttggagaaaccataccacctctcagaaccccagctgctgagcactggcagggaaacagagggacataacccctgactggcttctgaaaaaggaagcaaacaacccactgggctcatcagacctctcggaggctgactcaaaggctcccctgaactcatggttgtggatgacctggagactgggaagcagaaaccccacacctgtcctcctccaggtcccaggaagccaggatcacagtggccctccacctcccctgtgaaggaatccaggcccggcaggggcggcaaacagccaacctcctctcctagcataagcacgcagccaaggcctgagtcactcccggcttggcccacggaggtgggcaagctgccccagtgcagttcatctggccttgcccaaggtcatcccagccagcctcctgcctggtacatcagggccagcgagggtctgcatgggggctatgagagctggggagccagagtcctgggtgcactttgtgaccttagtaaggctgtgtgacttggggaaattgtttcatttctttgcacctcagctccctcatttgtagacataggggaggagtattaatagaacgtacatgggtacctggcgtataataagcaccagtgacacaggctgctgtggcttggggcacaggcctgggaccttttcccgggctagactcactccctgagcaatctcatccagccccatggcttggaataccatctgcatactgaacactggctctcatgtgctccaacctctcatgggcactcccctcaactccacactcatacagccttcttgctgcctccacttggacatccaacagcagctccaacaacatggatccatccgacctgtgattccctccgaccccaacctgcttctcccctgccttctccatctttgttaatggcaactctccctggctccagccaaaacctttggagtcatcttggagtgctctcattctcttatactctatgtccaatctatggcgaagcctgtcttccccgtcttccaaatgatttctgaatctggccactccttaccacctccacagctaccataccctccctagctccctgcctcccacgtgttggcctagagacccctcatcacaggggtcatgcccttcctctgctccatgcctcccaatggctcccatgtccccagaatacccagagctttaccgtggccaacccacatggtcctgcccatgtcacctcgctgtcatatgtgcacgcacacatacagacagagcctaactctctgtggccacctggatccttgctagtccaccaacgagccaagcacactcccacccaggggcctctgaacttactttttccaccaactgctacgttctgctcccacatatctgcatggctcccttccttctggtccctactcaaccatcaccttgagggggaacagagtggcaagtccaccccccaacatcccagtgttcctaaccctttaggcttccctgtcttcttcatgaaacagaccaccttgaatattatacatttgtcactgatatcttctccactagaatgtaagctccatgaaggcaggggctttgctatactcactgtggtatccccagtgcccgaatcagtgcctggcatggtcaatagacatttattaggcgaatgagtaaagaagggaaggaaagatggaggagtgctgtaactgtggatttccctccctttccttcctcctccggctcacagcaatgatgggagggggccttttcagtttccaaagccctctctcccctacacactcatttactcctcacaacaaacctagaagatatataagggaatgcgttattatctcacttcacagacaaggggtctgaggccaaggcagcccagtgacgtggacacaaggctgatggcaggctgcccctttccaagccagtgccagcaccagggggcaggaggctaaccccctcctagatctgacttgaccttccattctgccccccaggaggaccagggcccaaccctgaaaggtgggagttagaacaggaagccacaggtcccaattgccagcaccttcctgtgtcccacccagaggccactcttctggaaggagggtaagactcctcagaccagctctgtctctgtgcaccccaggctccctcctctgaaaatcaccaaggagcagaccctacgtccatctgtgactgccgtgatgcctgcctgcagagggatttgcttcttgcctaagatctggcacagcccagtggcgctgccaagccaggccactaggtggtgtcccagagctcaggccctggcagctcccagggaaagggccagagtggcttttctctcagaacccaagaatgtgccccacccccacccttggcctgattaaaagggagaagaaccacccagttgcctcaggggtcttagcacccaagacccgcagagttgtcaaatcatttaatcctaggcaggaaatctttggcacatgtgccaccaccttctagccctcatccttggcagacatcactaatccacccaggtattactgtcctacagaacacacacaacctcagaaccctttgcaacaccgcctctgtgcaagccacgaccaagtgattagaactggcatgcaagacaagccacttgccagcgctctcatttcccgtatgaggacacgcaggccaggctcactctgtctcattgggaatccaggctgcaaaagccagtggggccagaatgaggtcatatgaccctgggaggcttgtgtaaccatggttgagtcctgcggaaacctcaagtgtgtaatggcagaggctgctgggctggggcagctgcattctcggccaattgtcacctcagagcgggtggggtgcagggaaatctgcctgagcttcttggcttcagagctgaagaggccccaaaagggggtgaaaggaagggaagaggagagcaagagacagaggctctcagggtatgtgtgtgtgtgtgtgtgtgtgtgtttcaggcagccctgacagagacgccttgtcctcctgcccctgcaaaggcttgttttcttcccaagctattaatgtcgctgcagcttcaaaagccgggtgacctttaaacgctgagcctcctgctcctgcccaaggctcggaaaaggcttaatggaaactcgacccaaatggccacagctgccggggctgcaacaaagccagcctcattcccgaggcccccagagctgctgggcagccacacctgtgcccacccccaggcagccaggaagggcaaagaggaccctcgggcacagccattggagaaaagaggccactggaccttaggggaggaggaggaggagcaggggagagacagacaatgctgtcatgcgctgctgtgtgaccttgggtacttctctgg[137 bp omitted]ggtgaaacaccgtctctactaaaaatacaaaaattagccaggcatggtggtgggtgcctgtaattccagctactcgggaggctgaggcagagaattgcttgaacctgggaggtggaggttgcagtgagccaagatcgtaccactgcactccagcctgggtgacagagcaagactccgtctcaaaaacaaaacaaaaccaaaccatgaggatttgataaaaggactcctaaacctctttgccaggaagaagccccactgccacccagagaagcaggacacctggtttccatgcccacacagcagagctgccggcaggggtgaggctgggggcagcccctgccttccaaaggctactccatgagctgtgcaggctgggcatggcatgatgccttggccacccccacccctatcacttagatctgtaagggtggggcattcctttaaaaa[136 bp omitted]accctgtctctactgaaaatacaaaaattagcccagtgtggtggcgcatgcctgtaatcccagctacttgggaggctgaggcacttgaatcacttgaaccaggaggcagaggttgcagtgagccaagatcacaccactgtactccagcctgagcaagagtgagactctgtctcaaaaaaaaatcaaaagaaaaaatacgattcaaaaaagaccttttcttttctaatttttctctctcctgcctcaacacttgtggccaagtctgtagccaatgggagatgtggggcagggacgagggcaagaggtttcagagaaggtgaatgaggtcccttgtggacaaattggtcccagagcctcagtcctaaggacatcatcattcatctctgctcctgaggcccaaatatcaggtgtggctgccacaaaaggcaccatcaagaagccaattctgccttctagtgaaaaagatccaagatgaggcttctcagcagagaaacatgtcatttgtttggttcatcttagcaagataatggtcataatagtcataatgagaatagataacacttattgcctgcttccttatatgctagccactactcaaagtgccttattgcatgttaactctcttcatcctccctacagctctacaaggtgcatattactactgctatttccacttcatagtagaaaaatgaggcgtagaagggttgagtaacttgttcaaggtcacacagctaagtggccaagctgaaatttgaacccagaaggtccgattccagatttaacactctgtatccattgggcttgatcaccattccatattccctagagcctagcacagagctgggcacacagcaagaactcaataactgtgagttaaattgaatactaaaggacagggttgcccctggagaggctgggggtgcctgggtgccactggaggtataagggatggtgcttatgtccaggaagcaaaggagaagacaaaacagtggcagtttcctcacaaaacctttttcccatcctactgaagttgtcaagttgcctgagcaaccaactgttttccaccacaacctgggctggctggggactatttccacaacagtccctcactccataaacaaaagccaccagctcagccaagatattcgactcaggtgcctgggaggagatcaaacctcagcggattaagggggctactgtccccctgcccctcccctcccaggtgccacagctctaggggaccccactgggctggcaggaacacgcgcgttcatgctaccaagtcaaagggcccacgctggaggaagggggccactggtaactcaggtgcagggccaaggaagctgggttggctccaggcatgagctcatactggaccaggcccagcttcttgggaaaaggggtcagctgctcctccctgggcttctcctataggcagtcaggctgaaggcccccccagtaggctgagttctgaggtctggacagcagcaggagacacctctgggtccccggacaggcagcaatccatgccccacaatttagcatccgaacatgcccaggtaatccgggtcaaggaacccatgattagaaaggagtgctcaggatgggcagaggagggtcctgcaaacagaactcccaacccctgcccttgccctccacactaaggcacactttgcacctacctactgattcaggaattccacttctatgaaatttacctacagatgatatgtttgcaactgtgttgagtatgggcataaggatattccttgtaatagtctaacagcagaagactggaaacactctacaagtctacccgtagcaggctgatgaaaatatgatacattatcagcatcctcctctctctatataatgctattcaataacaaacaaaaatgagggatttcaatatgtctctttagcccaagacctaagggaacaatgcaaggtacaaaacaatgagtatagtcactctactatagtgcattatggggtgtgtgtgtgtgtgtgtgtgtgtgtgtgtgtgtgtgtgtatgaaatccgaaaggattcacaagaaactgataatatatgtttcccctggggagaactgggtcataagagatagatcaaggaaatttttccactacagattcttgtatacctctaaaattttgattgatactcatttattaatttaaaaataaaatatgcaaataatccattattattggattactaagaacattaaagtaatagcattgccagtgatttttatatctttttcttctttctttttttttttttttttttttgagatggagtctctctctgtcatccaggctggagtgcagtgatgtgatctcagcttatgcaacctctgcctcccgggttcaagtgattctcctgcctcagcctccagagtagctgagactacaggtgcgtgccaccatgccaaactaattttttgtatttttagtaaagatggggtttcaccatgttggccaggctggtctcgaactcctgacctctgataatctgcctgcctaggcctcccaaagtgctgggattacaggcatgagccaccgcgcctggccatgtcttttgcatattatatcatctacagcagacataagttactatttaataataattatagcaaacgtctatgagcacttggtaggtacatgcattttctatatacttggcatgcattatctcatcaaatccccacagtacagcaatgaatacatccatttcacagaaaagaaaactaaggctcagagagattaaataacttacacagggtcacatagtcagtggcagagcccgatttggaatccaaacagtctggccccggagtccatgatcttcttaacttccaacctatagtgtctctaattaaaagtttttctagccgggcgcagtggctcacgcctgtaatcccagcactttcggaggcc[134 bp omitted]gaggcaggagaatggtgtgaacccaggaggcggagcttgcagtgagccaagaccgtgccactgcactccagcctggtctcaatgaaaaaaaaaaaaaaaaaaagtttttctagaatgtctttactc[133 bp omitted]tggtgaaaccccgactctactaaaaatacaaaacttagctgggcgtggtggcaggtgcctgtaatctcagcgactcaggaggctggagcaggagaatcgcttgaaaccaggatgcagaggttgcaatgagccgagattgcaccactgcactccagcctgggcgacagtgcgagactaggtctaaaaaaataaaaactgaattgtggtagaaaaaatcttaagaaagcaaaccccagagcctccagggctttaaaaccttttcaatcctaagaatcccaacccaatccttcctgctctgatcatttaggcaggctttcttcagtcactgcaccccatggtgcaccctccaaccttggtcagggactcacctgcctcctgctggggatgcagggaaggaatgagggccgagtggacaaagtgctggctcatagcatagctgtttcagaggtagaaccacagtgtggagggcctgttggggcacaacagggctgggggtctggccaggaagctgccggtggaggggagaccacaagttgtttactggtgctatgtctggggtaggaagccatggagcgagtggtcaggagtggggctttagcctgagtggtcaggagttgggcagtcctctgcttacctcctgatcctgcagcttatggggcaagcaggattgctctgagcaatctgtaatatggggatacatataccttctcagatggcgctcctgcaggggattgactgtggtgggcatgcacagcaccccacaagggaagctgtcagtcagaggcagctgttagtaagactctatgagcacgggccattcacaccccaaggccacatagttccaaggggctgattctagagtctggcccaggcgtctggcctgggaatccagccctgaagggagtgaatgtggagcacaaaggcctccccactcagggacctccaggacctcaggctgagagggctcagggaccccaagggaggagcagggagctgggccagcagccctgtgcccattcctgcccataccctgccctccagctaagcttccaagggtaggagaagtgattggaataatgcagggtgcccactcctaaccaggggaaggaggtggcttgaaggggcctgtcccccaagggaggggctccatgggctctgggcagcaggagcacaggcagagtggccctctcagaaatgccttctctggcagctgaggaatgtaggcccaggacagaggaacagaggctgggagggaggggtggctggcccagggctgagcttcaaaagagcaggcagcagctgcggctgggaggccgcccgcctcaggcagccgggacaccatcagaaattccacccagagtgagaagggcccagcccagacagcagatgggataatttagagccactcactgctgggccagctgcacccccccaaccacagactgctccctccacccggcctcagcccctgctccgcctgtgtagcagcagcgatccccttgcacagtcaggggcgcccagagcccagctgcccaggtcccctctcctgcccatccacatacccacgtgcccacacgtatactctggagctgccacggttagggaggcaggagaaacctcatgttttcacttccacatggtgcatgttgccagaggtcagagagcccagtggctgcagcactgggattcgaacccagatcgtgagactcctggccagtgctctctccttgtatgggcacatacagcagcacatgccagcacacagctcacatgcctgcatgtgctaacaggctcccactcactgccacacacaccagctcactcaaccccattcacttgcacagtgccacatgctcctcccaggccctcgcagccataggacacagacaacactttaggattttttttgaaccgtcccacacagcccaggcactcaatgtactactcccctcttcgcccaactctgaagctatgtttttaaaattacagtcactcttctatacacactcgctagtgcgcactgacagcaccctcagccctcccacagcccaccctccaagccacccccttcattaggctgatagcagggccagatgaggccctgggatccctctcttcccccatctgcacccagaatgggttttacagcattggtaaggtcaggctgacctgacttgcagcaaaactggccagaaccaggaagtggcacaccctggccaagacaccagcttcctggttccctgcaggcccagctcctagaaggcagtgcagggaaggacctcaggccagctggggctggtagcctcagccccaaatctaacaatcaggggaagggggcaagagcttttaggggtcccataaccagcttcctttcgcctcccgagggcctcaatctctacttctagaaaatggagagaaacagtccctgtttggtctgatcattgaaatcttccagggatataggtgggggctgggggagccggtcaggaccagagaaaggcaccactgttctaggcacaaaccaggatgagccctctgcagaaacagcctgctgcatcctagtcccccagggatggaagggtctgtacactttctttagctacagaaccagaacccctttcttcaaatgaaaccctcagcagaagtccattatgtaaaggcattaaacagaaacctgccctcatccacccccagcaattatgcatcatcagagaagctgccatttaccaagtgctaggcaaagtacttctcgtgcatcacatcatttaatcctcgtgacaatgtagtagtgcaggttattaccttccaccatcatcatcaccattttatagatagatacactgagtcgtgtgtgacctagaggttgtccaggactgcgccacattgaaattgcatgtacatgtcaagtctcctgacataccacttacttgcaatgcattttaaagcctgggtttaatccctcatgctctcatctttaaagctgtttgcatctctgcctgttctgctcactgctactgatgaggcttcaggaaatgcaatgagcttttccatcagtctaagaagtcaaatgttctttgcactatagcaggtgtatctcagaggacggtggcgaccaccttcctcagactcccctgaggtgtttgctaagaacccatattctctaacccactattaaatcagaatctctgagaacatgctctggggatgtgctttctaacaagctccctgggtcattctgatacacagtaaattgtgaggaccactctcttgcaaggtgatgcagttcagagacctggatgctggttttggtcccatcactaactagccaagtgacctcggacacatcattttacctactgggcctccaggtttccatccggaaaatgggagggtaggactaaataatctccaagactcttttcacctccaacattctctgtgtccactctaggttcccagctggtccacaggtatacaaactgactttcacagactgcttggtccctgtagcagccagcgcacactgtagacactcatgacataaagttcctgtctagttgatttaaggaaacctgaaaaaataccttacctctggctctaggccctaaacagatggcttttggatcatccatgccacctacccctcccctgaatatttattttcttcattccagccccagccgtgagccaaccaggactctgtaaacactgagtctgcacacctgggcttagtcaacagtcatcaaacaaaggcactgccaaatcacctcacaagcccaaacttgcacctactctgtctgtcacagggaagcagccacctgggaggtgtgaatggtgtgctccccttctcccaacacagaatgggcatgagggattgggctgtatagaggatgtagccggaacggccccagcctacaaatgggttgcaagtttaattagacttaagggatatgagaaaacagcatgagaagcagccagcagttgcaagaatcttccagaagcagctagacatttctcagtcccttggcttctt[132 bp omitted]gaaaccccatctctactaaaaatacaaaaattagccaggcgtggtggcaggtgcctgtaatcccagctactcaggaggctgaggcaggagaattgcttgagcccaggaggcagaggttgcagggaggcagaggttgcagggagccaagatcacgccattgcactccagcctggaagacaagagcgagactccacctcagaaaaaaaaaaacaaaaaacaaaaaacaaaaaaaaccatgatgcattcagtgcttgaacctgggaggcggaggttgcagtgacctgagatcacaccactcactccagcctgggcaacagagcgagacctccatctcaaaaagagaaacgatgatacattcaggtagtgcttgaacactgcttgctggtggcaaacatatgactgactcgtcctgcaaggtctgtgtatccctaacagcagagttgtggggattagcagacccacagcccggacacgggttgaattgagattcatgctacctttgtgtatggtgaacctgtgtgcatgtgcaaaataactaaagaggaaggatgaacaggaaaggcaaggatgaaaacccagcttccacaggggaaacatctgtgaattgtagccaggatctgctgatactagtcatttgagaatcccaagatagattatcctctcactctgaccacactgactgtccacaatgattgtgctttacgtgtgcacagcactcaacagcttaagacgttgcgggaaagtccccgaacgctttgcattcagccaggctccaggttgggcacaaaccctatagcagagagctggcccaggtgccatgccatcctcacaacaatcctatgaagtagggactgttattttgcagaggaggggattgaagtacagaggagttaaataccttgccccaagtctcgcagccaggagtaaccaggtcaggattctaccccagagcccacactccaacccctcaccatgttgtcaccccacttacaataatgaatctctgcacctctgcatgggacaaagagggaaactgagtcttccaggagggctgggcacttgaggccatcctggcaatggtcccacctccagccatcctggaggaggagcgaagccactgcgttgagtgcgtgggtgcagtgggccagccagggaacagggaggtaaaaaaccaagggggcacctcagctctgagctgggcaggccaggccccacctcatgcttcctctgccacagcagtcccaggccaggagggcaccttgccaggctccactgccacccagaacatggcctccctgtcctggtctgggttctcctcgagttgtatttccatggcagccacaatgggcagcagccagggtgagtcaggccaggcaagaggaagtggccacacttgaaaattattaacatgcagggctgagcttgagtcctttgttcttgagcaaagactgtagcatttcactttcaggaaggagctaggagggtggggcaggctcagaattgcacaaccaaagcacaggctcaaacacacacaggtcccaggtggaagtcagcttagacaggccacctgcagaaaagtgcaggccaacccacagccccatacagcaggtccacagagaaaatacaggccaactcatctccactgttttttaaatcagaggctgggcacagtatatgaaaacctatataatcccagtgctttgggtggctgagatgagaggaccacttgaggccaggagcttgagaccagcttgagcaacatagagaccctttctctacacaaaaggaaaaattagctaggcatggtggtgcacacctgtagtcccggctattcaggagggtgagatgggaggattacttgagcccaagcgttcaaggctgcagtgagctatgatggctccactgcactccagcctgggtgacagagagagagaccgtgtttcaaaaaaaaaaaaaatcagagagggtttccaacagggataaaatcagggtttttgtggtcaaaagtgttccaagtcagggagaccaagcaaaggaggcacaaggccggccacagagggaaggatgggactctgggcagccagaccccagtgggagccctgcgtctgggagagatgaaagacaccccctcaccccagctggcagggggcagccccagctctaggaagactgccttcctgcacccccttgccaaaagatggcatctctcctccaaccatgcagctgtcctggcccccctaccccaccgcgtctcctaggtgagaaaaacacccataaccatcctcacgggcacccagcaaccctgaaacactgtgtctcgggcaacttttcgagctgcagctgttccctgaaaaagtcacacatcagccaccaggagtggtgggaaaggctgaattctggagaagagggatgaaggttggggaggtgggagggagggaagggaatatggtcaccagaggaaaaaagtcaatcaacgaggaaaaatctgtttctaaaaatgtaatgcaaacaacaaaaaaacaggctttgagcaagccttataagccctggggcccaggcctgtccttagttccccgggaatggcccctgctccccgtcccatttcacaggggtcatcaagaggctaagatttcactctgctcccctcctgcacttcaggagagcttaaccttgaggccttcaaggaaattgggagaaatgggacccctgtcctttggcaattacaaagtaaatggccctaggggctaggcgtggggggatcgccctaccgtaggggagtgggggggcctcattcccacccttcctcggctctgcaggggtggctgcagcagaggtggcttgttcagggaagctacctgctccatccgtgctgggaccacaggggcaggccacccaccgggtccaactcatccccctaccaaagcagctctttttgtaaagggctttcggggacaggaagcaataaacagagtcaagcggccaagatgcaggggctgattatacagtttacggattttccaggcctttttgtactctcccaccagctgcccggggctctgcagaaaaaggtgctggagaaagaccggctggtccctggctttacaggtggccttttgccaggcctaactgggccttcctgagcgaatgagggggctgcatgcctcgagggtcctgcaagtcaccatgaagaacactgccacccggtaccactagagaccagcaggctaatggctacagcttctctctctctctctgacacacacacacacacacacacacacacacacacacacacactccagcctgctgctcaactctccacccagctctaagtcactctggtattccagaggggaggggatgcctggctgcgcgctgcctgcgtgctgaggccaggtgggtggccctccttcacaaggaagctcacagctcagctcagtttagctgcactgggggtggcaagcaacttgggaaagactgaggctggcggggaagatggctctgggctggagggcctccccagtgcgtgctcagctcacattccccaaacaggctatgatctggtgaaacacaggcccacgcgtgcaaagccgtaaatgcagagctaaaatggggaaccacccacttgtctctcaataccccatatgcaacaaaaaacacagggcacatccacatgcagccaacaccttccagtgccaaatagaatcgcatgaaaaaaaccaagtggccaggccatgtgtacaccgtaccatttttgttcaaatgtctggatgtccatgtgtacacttgggtacacacaggaagacgtctgggtggatatgcaccaaatccaaggcagcagttacctaaaaggaagggttgtgtgggggcaactcctgctctttgcttcatgtacctctgcaacctttggtgttcttacaagaaatatgccttgtttctgcagtttaaaataagatattaaacaaaataaagttcattgttggtggcaatgtaaaatggtacagccactatgaaaaagatagtgaaacacagtgaaaaaccacagtttggtggttcctcaaagttaaacacagaattaccatatgctccagtgattccattcatgggtatataacccaacaaattggaaacaggactcaaataggtaattgtacatcagtgttcatagtggtgttattcacaatagtccacagctggaaacaatccaagtgtccatcaatagataaatggataaacaaaatgtactctacatatttagaacaatggaatattactcagccacaaaaaggaatgaaatgctgacacatgctacaatgtggatgaaccttgaaaacattatactaagtgacagaagccagacatagaagtacaaatattgtataattccacttatatgaggaacctagaacaggtaaactcatagagacagaaagtagaatagaggtttccaaggactcagggaagagggagaattggggacttattacttaatgggcatagagtttctgtttgggatgataaacaagttctggaaatggatagtggtgatggtggcacaataatgtggatctactaaatgccactgaattatacgcttaaaaatggttaaaatggtaagttttatatttagtatgttttacacaagaaagagagagacaaataaggcaccagattgtagaagacaccatgagtcaggccaggtgcggtggctcatgcctgtaatcccagaaccttgggaggccaaggcgggtggatcacctgagatagggagttccgagaccagcctggccaacatagtgaaacctcgtctctactaaaaatataaaaattagtcgggcgtgatggcgggcgcctgtaatcccagctactttgaggctgaggcaggagaatcgcttgaacccaggaggtggaggttgtgatgagccgagatcatgccattgcactccagcctgggcaacaagagtgaaactctgcctcacaaaaaaaaaaaaaaaaagaagacaccatgaatcaccatcaccaggcagaagggggcactactcgggctatttagagagagggcagccagcacacaggaaatcctggcctgcacagaggggctctgtccccatctgcatggagtgggctgggagacaatgacacccctgttgacgagggctgttcagatggcctgcagagtcacgcatgccacaaggctgggggagacagcactgcagggatactttgtggacatttgaaatccttgcgttatgatacgctaggaaacagtattttaaaaggctagtgtgctggaaaacgaagcatgcatcagggaaccttggacaggaggggactggggaagagagatactggaggaagtgggcaggagaggctgggagaagaggatcagcagtctgtcctagaggaccctcagtcaggctggatcattcactccacagacgggagcatgctcccaggttcagggtagtgggaaagtgggggtaagggataagaggaccctatttacatctagtaaatacctctgtacatcttcagtacccccacaaatcttgttcaaaagtacatactgggccaggcgcagtggctcatgcctgcaatcccagaactttgggaggccaaggcaggcggatcacttgaggtcaggagttcgataccagcttggccaacatggtgaaaccctgtctctactaaaaatacaaaaattagctgggtgtggagacaagcgcttgtaatcccagctattcaggaggctgaggcaggaaaattgcttgaacccgggaggtgaagcttgcagtgagccgagatcacgccactgcactccagcctgggcaaaagagtgagactcaaaaaaaaaaaaaaaaaatactgtacctatctaaaatgagaaagaaaaagctgccagtgcaccccaccccccaattcttgcagaaggcccaaattcctgtgacttgaggccaagccataagatccagaatagggaataagataaaaactgccagggtgagctgaacaccgttgtgactggacctcgttcacacacgcatgcccacgggccagccaccaggcatcaggttctttttgagacgaaatctcgctctgtttcccaggctggagtgcagtggcatgatctcggctcactgcaatctccacctcccaggttcaagtgattcttctgtctcagcctcctgagcagctgggactacaggtgctcgccaccacacctgacaaatttttgtatttttggtagagacgaggttttgtcatgttggccaggctggtctcaaactcctgacctcaggtaatctgcctgcctaggcctcccaaagtactgggattacaggtgtgagccaccgcgcctggtcatcaggttcttcttgaaggagagaagcacagaggagcttgggcacacccaagtagggccccacatgctgagaactgtgatgccaagacaggcttcccaggggcacggtttcctgaggtttagccacatatctccaatcatgcaagggctaagagaagccttgtgtggggcacatttgtggtcagcggcagctctgcctcacttgagataacgatatttaaagagtagattttttaataaaaggatgttgtatccaggggcttcctgaaacatgccaggtattatttgtggctgtgtgtgtgcatttgtgtgtgtgcacgcattagaaagaagacaggtagctttgaaagatcataatgtgaccaggtgcagtggcttacgcctgtaatcccaggactttgggagactgaggcaggtggatcacaaggtcaggagatcgagaccatcctggctaacacagtgaaaccccgtctctactaaaaatagaaaaaatcaactgggtgtggtggcatgcacctctattcccagctactcgagaggctgaggcaggagaatcgcttgaacccaggaggcagaggttgcagtgagccaagatcgcgctactgcactccagcctgggtgacagaacgagactgtctcaaaaaaaaaaggaagatcataatgtagccactatggctgtctcagagacctacttcttctagaacctactgtccaataaggtagccactggtcatgtatgacaataaaaattttaattttaattaaaattaaataaaatgtatttatttgttaattttttttgagacgaaatctcgttctgtcatggcgagacggggtttcaccacgttggccaggctggtctcgaactcctgacctcaatctgcccgcctcagcctcccaaagtgctgggattacaggcatgagccaccgcacctagcctaaaattaaataaaatttaaaatgcagttctttggtcataccatcacatttcaagtgttcatcagccattatggttaatggccatcatattgaacaggacgtattttagaacataagccctgattcactataactggaagagctttattatgactttctgagggagaccaaggactatggatggtcaatccccagcagaggagcccttccacatctcctgggcaaacagagctggggtgagctctgtgtcctctcatcactgagtcctcagcctcatccaagatcaaagcgttggctgtttcctgtgaaacttcacacccaggcagagagaagctggggtccagctgggagcctaaattctgatgtccacactggcagggcccaggcctcagaggaccaggctcagaaaggctttcccagtttgtctcaccaggaggaaggatgtcttaacatccccaggctcctcccctgttccctgtcctgagtgtgcaaatgcaaaactgcctccttgggcttctccagagcaatggggaggagtcagagaaaaagggcagctgaggcggggtatgcatgtgtgtgcgggtagacagcaggtaagtgcatatcaaagagaacccaacggtcaggctgaggaaataaccgaaagaggttctagcaacacaatgactgggtgtttggttctggttttgttttgttttgttttgttttagagatggggtctctctcttctgttgcccaggctggagtgcagttgcaggaccatagctcactgcagcctcaaactcctgggctcaagcaatcctcctgcctcagcctcttgagtagctgggatcacaggcacacgccaccatggctggctccctccatccctttcttttccttacaatttctgtgttgaagaacacaggccattcaatggcagccttctccacagactggagttcatggagtaagtttttttttcttgctaaacctcagtgacctcccctgctcagcccatggggcccctgtgacaataaaaagaaaaagtacacctgaaagcacatagggaaatgcttacgatagtttaagcaaagaatacaagatgcaaatgagcacagaatacaaattaacatatatatgttatgttttcaaccacagaaaaaaaaatgcatagaaaaaaggatcaaaaatatatatgcctagggcggggcacagtggttcacacctgtaatcccagcactttgggaggccggggcaggaggatcgcttgagcccaggtgtctgagaccaccctgggcaacatggtgagatcctgtctcttaaaaaaagaaaagaaaggaaagaaaaagaaaagggaaagggaaagaaaggaaaggaaaaaagagaagaaaagaaaaaagaaaagaaatatgccaaatatatcaataactgtcctggatggtacaactctgtgaacaccccctttttcttcctttcttatatttttccacaattagcatatcataatgtgatcatgaggtgacaagtcttctttaaaacatttcaaagaagagtgcccttaaagtctggcatgagacccagtgtgtcaccaggccttcacagtaccccctggctttgctctgttaccatggccaccaccaatccagctgagaccctcagcctcccaagcccgcttccctgatgccttcaagctcctcttgccgtctccctcccattttctccctatgccaccaacggaagagcaggccaggtcccctccgaactcctcagtctcttatgtaaagatcacatccctccctctgcatcagcggtcctcatgctcagcaagcatcactgtcacctggagggctggttaaacacacattgctggcctccacccccagagttcctgattccctgggtctggggtgaggtccaagaatctgctatctaacaagttgttaggcgatgctggcaccactggtccagggaccacacctgtctccctaactaagccctgtccatccttcaagacctcgctcaagttcccctgtcccatgaggcaatctctgagaacttcagccaatattgatctctctcttcccttccagagcacctgttcctcttaagggtggtttggtagatggggagatcacttagcggccataatcaggggcagtgtagcacttcatcacctgctgtcttgtgtggctggctctccttcatcctaccagctctcttttttcttttttcttttctttttttgagatggggtcttgctctgtcacccaggctggagtgcagtggtgcaatctcagctcactgcaatctccgcctcccaggttcaagcaattcttctgcctcaacctcccgagtagctgggattacaggcgtgcgccaccacacctggctaatttttgtattttcagtagagatgggatttcaccatgttggccaggcctgactcaagtgatctcctgatctcaagtgatccgccctcttctgcctcccaaactgctgggattacaggcatgagccaccgtgcccgtccctatcagctcttaagggcagactgggacagacatttcttaagtgattcctcattaaccaggaggcattcctcatgtcccaggtgaactgaatctgtttcattctcaggcaccccagtgacattcacaaacagacttctaattattcactcgctcattcactggcagtcaaaaaacacttactgagcacctactgtatgtcaggatgcgcaagataaaaacctcttttcttcacagaggccaagaattacaacagcatgaatggcagaagcctacagaaggtgctctgtgaggatccctcccaaccgcagcccaacgcccccacccctggccctggagaccgctacacacacacaaccttggccccagttgcaggtgctggtgcctgccaacaagcacacacagttgcagtcacaccctcgtgtaaccatggtgaggatttggctgccggtcataggctccattgttccccagctaagccaccctggactcggggacaggatttatgggcagacattgttaggagaacagatgttcgggcaggcaggcctgggacccgctggagggagtcaagaagacactacctcctaattaataggcggtaaatgtctgaggaacagactcctgtcccatttcttcaaacatctggggttccggacacttaggccctctgccaggtgagacatttggagcaggctgaagagatcatagattctggaaggtagatgttggtttctctgtgatcttggacaactttttacttgtttgtgcctcagtttcactatctactaatatttactacttaaaaaaaatagtaaagccaaaaaaaaagatgataaagacaccgtttggaagaataaagggagagtaaaaaacaaacaataataacgccactgtgtaaaaataaactgcaaaaagaccactcagggaagctccatcaatgccttggcaggaaaattctaaacgtatacaggcctacctggcacactgattctcaactagaggggtgcatcagaatctccggggagcctttttctttctttcttttttcagagacagggtctcactctgtcacctaggctgtatgtagtgcagtggtgcggtcatagctcatcgtagcctcaacctcctgggctcaaaagcgatcctcccacctcagcctccagagtagctaggcctacaggctcataccaggaccagctgcttacat[140 bp omitted]gcctctactaaaaatacaaaaaaattagctgggcgtggtggcaggtgcctgtaatcccaactacttgggaggctgaggcaggagaatcgcttgaatcccagaggcggaggttgcagtgagccaagatcacgccattgcactccagcctgggcaacaagaacaagactccatctcaaaaaaaaaaaaaggaaaagaaactggtctcactatgttgcccagacttatctccatctcctgggttcaagcactcctgcctcagcctcccaaagtgctaggattacaggcatgaaccactgtgccagcctctggggtgctttttaaagaaaaaggcccatgtgtctttgtcaattctactgaatcagaatttcctgaggtgcacccaaaccccatccccaagatcccaagtaagtcaaagaggagtgcagggaggagcagaggctgcaggggctgtaaagcagggacagggcccagggactctagggaggagaggtcaacattgagcaacccctcatttctgccccccatcccagggatttctagcgaggaaatatcatccttctcgtctgaactgaccagtcctccagggacctgctgattcacacaatgcatggctgtgtcctgggccactcctccttctggccaccactggccagcaccccaccccagcatactttcctgaccctgggttctaactccttggccccagaagcctcaccctggccaactgcaactctttatttcaaggattcaggttgtagatctcctcctccagaaagtcttctcacatgcacttcttggctcactcccacgtggctttggcctattgaaccctctctctcctccaccatcaatgtggcagcactagtcacatgttctcacgattgccactgtgcccgttggtggccccaacagatggtgcccacctggaaggcgggattttttggatctcattcagttctcggtccctaacaacctgctcagtgcccagcatagagcaggcaaggaatatgtctatttatgttgatcagaagaaagggagaggaggagattttaaatcaaacagttatcctaggcacatttttcaaaactgtaggaaaactatagcaaatacttgtattagcatgtcctgtgtgccagagagagaagcctgagacacagggggtaaataagtccacagggtatctctgcttcaaagagaaaaagagttaaaccttggggggtcgggaggagctacctctgaagtccttgctccctgtgccttagaggtcacagtgactccataacttcaccctttggataaagcacaggttcaggttgctgtgcacagggaggagcaatatatctcggcaggaggtctctctcaatgaggtaccagggatcctgttgcatccatttgggagggtctgggagtcagcagtcccaactgggagctcctggagctcgatttagaaaagggacagggataatgctatctggggccttggcatgaaagggcttttctttcccatgtccagactcccaggggagagagaagggttccaagtctcctagcctgatggtttgagagaaacagagggatgtggcctgcacctgccccacctggcctctctgggtccaggatcaggccagggaggaggaggcccactaatcctgggtgcattactcaagagagactgtgaagaaaagcaggaactctgagtggcattaaagtaggcaggaaataaaatttattcagagtcagctagtgtaattgaaaatgaaccatatgccaggcacttggcaaggtgcgtccccacagtcttgatttaattttcacaccaacccaatgaggcagctactattctccttgttttaccaacaggaaactcaggcattgttctgctggaaggagagaaggccaggaggcaaccctcaaaacctgggtgtgtttggccaaggccaagtagagatttaagggtcttcgagtaaagcattcaggattcttactcttcatttgctatctttcttaaagacagaataaaataaaatgggatttaggttggattccaaaaaaaacttcctgactataaagaggtattagaaagttcatttcctaggacagatccctgaaagatgcaaccacatcaaatgcccactctgcaggcaggagactggacaatttgacatttaccaccacaggcacgctcagaggtcccctcaggcaactgggctctagctcccatctcaagtgaggcttgtggacaatgcaaaatctaaagtcaaacacatcctttgctaaatttaacaagcagataggcatagcgttcagatattaaaatgaagtctttttttaatgaatgggcagggcttggagtttgccaatgtcatcaatgaggttaatgtggctacgttaaagttagcacatgagttttggatgatgcagtttatcaaaccagcagggactgagcaacagctcaggcagaaagttggcgcctggccttagggagccctgtccggcctgggtatccttgcccacgtgccacagctaaaatgctggtaggacctcggggacttaaggcagggttgctgctacccccggctgtttgggccaacacttgagctccggcctggaacagaaggctccctaataggttgttaagagcctgggaaggcggaacaagctgggcggggaggagggggcctcagggggctgttatgataagcaagagctcagtctaaagacatgctcccaagctgaaggtttcatttcctgccaggcaactcacccgtttgaatcaaacacagaatttagtattcaccatagaacaatcatatgacaaaaactttgcagagtttacccagatgtaggttttccttaaggtaaaagaggagtcatattaccgaagcctcatcttctcacgagttcaaaacctctccaacctctcaggagaaaccaagggccggaaaggttaaaggcctcaccctcaaggtcccaccaaagaatcgaagctggtgccagctctccgactcctacccagcaacccgccccaggtggccagcagctgcctctgagaatgcagaaggccgaggggggctgagagtgtttctaaatcacagcacacttgctccatcccgatggccttgtgatgcctgaggcatgagggcaggccaggacaggagccatgcagcggggtctcccaccccaggccctccaggcccccaaaaggcttcctgtcaggccctgcactgccccctcctcccactttgatcccagagaggggagggggtggagagtccagagaagtccccacttggcatcgatttgcccaaagcaaaggcaacacaaaggctgcacctgtttccatggagatgcgacggggaagcaaaggaacaaaacagggagaaacacaaacccgtcaccacctcccaggccagtgtgatcgatgctggcagaccagagccctgacaggaagacagcggaaggatgaaaggtaatcagtggatctagaagccacactgggagccctttcaggccacagagaggaggccagcagcctcgcccacccccaggctcacaaactcgcctgggccccgctctcgagaaccagtccaagcaaaaactcccagacggaaatccacagtgagcacttactttacaaaaggattccttgcttgactaagggattccttcaagcagcaaaatcccacctggagtgcactgtctgttttatttcattattcacttctctgagcaggaggaggagggggtcaagggagtaacttccaggggaaagtttgtgagaagagatgaggggatggaggggtggggactggactctgttcataaaacatctcctaggagaggcccacaagaaaatggagacgtggtgactttagaagagaaaggtgagcaggctaagcgcctgaggcccatccaatagggaggacatgggaacctgaacagtggagaagaatgggcggcaacaggtgtcccactaggtccctgaggttgccacaggtcccatcagggcacacaggtgctctcaaaaccactgggctatggggaaatgtgggggcagcctcatctcccccagggcaacaaggccagtggcttgatgcctccccgggtgaatgttggaggaagatgacaacaagaggcccagcagatggcagcggctcagaggctgtcataagggcctcttgactggcactcattgttcatcaggtgacacatactaagtgccacttagcacatgtggtcatcctgggacgaaggggcaaggccatgcaccaacacaatcctgcccttggagagtctcaaccaggccttcactccacggagtctcttcctgactataattcttacagggaacaaaaaccaaggataacaataatacttactgagcatgccatgtgggcctgacactaacacttgtctcattgatcctctcaaccatcccatgagagagaggcctttcttctccccattgactgatgtggagacaggcacagagaggtaaataactcacccaaggtcacacagcgagtaagtggcaaagctaggattcaaaaataggtctgcccaacttcagagcctgtgaacagcaggctcaacacctgccacatcagcctcatttaacaggcagagacactgaggctgagagaatgcaggtgacgtgcactgaggcaggggcagaggctgaactctgaagactactcctcctgacccaccccaaggcttttttgccttgtgatgcctccactaggaatgccagctggcttttttggtggggtacatggactgctctgtgtagtcactctcctgttctggacctcagtttaccccctcaacaaggtggcatcgttagagtgtgagcccctgctgtctcactgagaggagctgagaagaaacatggggcgtgcattcaaggtgttaccagggagctggtgggagaagcagtctcagtctcaaagatccacaagctctgtaatgtccacagagcaaaatcctaggtaggatatccaggctgctactcaacagtcttcccaccagagtacatgtgcaaaaccctcagggaacctggggacttcccagaagtattcagacatggatggcttccagggaatcaacttctgaaagctccacttcctgtgcttcttcctaaaactgatcagccgggaaccctctgggtctgccagttctcccctcaccaaggccctcctaaacacttcccaaaagaaaggcctacccccagtcatcccaacctcaccctggtatcccgccctgggttataaaagccaccaaagagacaacggaagaatgcagccctcatgggaggagttccagcaggacaaagaacttccttaagatgttgagaagggggccttatctatcttacctacccatctgtttattttaggattagaattaggaagctgacacagggacacctgtttaacctgtttaataaatatttgaattaaaaagaggagtcagagtttttccgacacaaagtatgatttggctggctggtctaaccacaagatccagcctggccaattaggaattatggtggatgttttccacaactgcctgggctgggtttgctgttctaaggctttgacaaaaataaatttgaagcaagtagatggcatacaataggcctggaaatacattccacttaaagttatgataaaacattttatatgtcaatttttatttttatttttatttttctgagatggagtctcactctgtcacccaggctggagtgcagtggcatgatcttggctcagtgcagcctccacctcccgggatgaagcgatgcttctgcctcagcctccccagtagctgggattacaggcgcctgccaccacgcccagctaatttttgtattatagtagagacagggtttctccatgtgggccaggctggtctcgaactcctgactccaagtgatcctcctgccctggcctcccaaactgctgagattacaggtgtgagcccctgcacccgggaatatatgtcaatttttatgttttcttaattaatttttcttttgtgagacggagttctgctcttgtcatccaggctggagtacaatggcgcgatctcggctcactgcaacctccgcctcccgggttcgagcaattctcctgcctcagcctcccaagtagctgggattacaggcaggcaccaccatgcctggctaatttttgtatttttagtagagacagggattcaccaa[131 bp omitted]ttcaaaattcttttgaggtgtacaagtgaaagaagtttgaagcctgttgctttccttccctggagccatgatcaaaggcttaagctcccacaccgacaaacccactaagccatgcacatagtaagttttcaagacaaggcagctgcaatgtatacaacaagcactagacctgaaacctgggtgtaactttatttctgctacttcttagctgtgtggctcagaaggttaagccacccagcctccttgagcctcagtttctccctaagtacatggagataataccatacaagatatattcaaaatcctgatgacgaggaggacattaaatgaacaaggtaaaagtgcctcagcacaaacagcccccagtaatagccaaccagcaagcgttttctgtttggcttggacaaattgatggtatttgtctctagacaatattaataactaacatttatcgagcgctcactatgtgccaggcactggactaagtgcttcacaggccccggctcattttgttttcacaacaacgctgcaggaaagatgccattcttattcctgatccacaggcatggaaagcttaaagacttgctcaactcactcagctagcaattaagggcccagtaggtctttttgattccagtgactgtgctctaaaaaccctccctactcaaagtgcagcctgagaccagcagcatcaacagagactggtaccttattagcaacgcaggatcccaggagctactccaaacaaactgaatcagtatctgcattttagcaaaatctatgagggattcatatgcacatccaagtttgagaatcactgctttaaacctctagtctggctaattttaccatcctggttttatcttgctgaaggtaatattactatgtttgctttctccatgcacacacacacacacagctgtcaattaaagcaagcaagatggttagggattataataatccatcagcaacacatgcaaaatgcatttttagaaaagggctaggaggatccacatcaaactgtcatcagtggtcacctctgagaaatgggatgggattggggggttgttaggaggagccaaagaaggctttttattatctgaattttctttttcttttctttttttttttttttttgagatggagtcttgctctgttgcccaggctggagtgtagtggtgcaatctcggctcactgcaaactccacctcctgggtttgagtgattctcctgccttagcctcccttagtagctgggactataggctcccaccaccaccatgccgagtaaatttttgtatttttattagagaacagggtttcgccatgttggccaggccagtcttgaactcctgacctcaggtgatctgcccgcttcatcctcccaaagtgttgggattacaggtgtgagccaccatgcccagctgaaatgtttaataaacagagtatagttgtatataggttatacaatttaaaaggaaagtatgttttaaaacacatgtacagatcactgggaattagttgtactttatgagctccgtctatccaaggttattgtcagctatccagcctctgactgtggaaagccaaggtagcgagttaatagggagatattggtggaacaaaaggagtgctgtgcttggagctggaagacaacagtccagactctgcccctgatttgctgtgcgatcttgaggctctcctccacgggcctgtgtttcctctgctataaaatggggggaacccccttcccctctcagggaccaacaatgcagtgaaaggcataaaagttccttgtgaactgcaaggtgcttggcaatgcaacggccgagtgttttcttgaaaagaaaagagatgaaaaaaaaaagcagtgaaacattcaccctcactcattccattccccaaacacagatatcccatgactttataaggaagatatacggagtaacctggatttagattccgtgggagcctcaggctgattttcaaatccttattcgaacttagaagttaggcttggacgtggttcaaaacatgaaaagaaagggctatttctcaatgtctggcccatttgctttgtgcttctctcccggtttctctgcaggctcacgagggctggggagcttctgtcccagggttctgtgtgcttcctgtctgggcgcagtggctgccctctcctttgctttcatggctttctaccagcacctgtctccagtgctacctctcagctgctcttagagcaaaagacctggggtctgtggttcggctcaattctcaccactgcctctgttttccactttgtatcttagaagtcagatttggtcaggcgcagtggctcacacctataatcccagcactttaggaggccaagatgggcgtatcacttgaggttaggagttcaaaaccagcctggccaacatggtgaaaccctgtctctactaaagatacaaaaattagccaggcatggtggcacgtgcctgtagttccagctattcaggaggctgagacaggagaatcacttgaacccaggaggtggaggttgcagtgagccaagatcacgccactgcactccagcctgggcaatagagacagactctgtctcaaaaaaacaaaaagagatcagatctgcagaaaaagcagcaaatgttacccctggctcatctggagggtgtggagtttggatatggagggataaagtgacttgctcaaactcatatagccggcttaaaacaaacacagttgggtggggttctctggcccaaaagtccaggcttctttaccctgtttcctctatgacctttggaaataacctcctttcctcaagacttgtccaccactcatttgcaacttgtctgtcactgacctcccccctctgttcattctaggagacatgaatctggggattaaaagtttctgtgcttttcttcaaacagaacaatcctaaaaccacatactctgaaagtatcattgaaactgaccgagaagagaatcctcagccagattttccatggagaaccagacctgtctaaaccagtatgagctttcattacagtaaagtaatggcaaaagaagcctcggggcagacaattccagattcactatttaagtggccttaggtgactggattcacctctctgagcctccatttttctcatatgaaagacaggaagagtgctaccacctttcagtttaaaaggaagattacaaataaggataaagctcttcctacatagcaggagctcaataaacagcaactattaccatcatgatcgctgtcattccagaccatccatcccaaagacaggggtctaaatcagttctgcaatccagctgcacattagaatcacccagggaatttctccctctctctttttttttttttttaaatagggtcttgctctgttgcccaggctgcagtacagtggcatgaacatggctcactgcagccttgacctccagggctcaagcgattttcccacctcattttttgattttttatagagacgggccttgccacattgcccaggctggtctcaagctcctgagctcaagcaatccatccacctcggcctcccaaagtgctaggattacaggcatgagcctctgcatctggctgtgaattttattttttgtttacaatttccaactagctcccaggtgatgccaatgccactggtccatggcacccaaaactcaaggtgttgggcagatggctggaaaggttacatgaatctctgtccagccaggctagagtgcactgcctcctggaagcagacagtcaactatatgacctcagattagggcatgaagactcagaaccaaagcttgtcctcaggtgactctctctctctttggcttcctgttggctttttgggttctaccaagagctgcagacaagtgtggccacaaagatgcactagcaaattaaccatggtgccacaccctgctttcacgtagagctgccgtctcaagatcatccaagggagagtcagaaggcaagggccctggtcactttcactcagataagcagggtataggacagcatggcctgccttggctggatgtcccagccagaaggagctgaaacaatggcaactctggtcaaccagacttctctgatcagccaaccaggaaagcttcccaccaggagctggcaaagtaaaggcacagttgatgggctcctgtgaaacgagagctggtggggcgctgggtggcaggcccttctggctttgaggttggtgcattttgtgaccctgaacatcaacaaaacaatactgactggacacctactatgtgccaggcaatgttacataaatattttcatttgaacatcacatcaactttgcaaggcgggcatcatcatctttattgtacacatgaggaaacaggctcgatggataagtaacaatggaacttacacaggacagagccagaaatgtaactaaagcctgtccaatacttcctacttctacttttttttttgagatgaggtcttgttatattgcccaggctgggctcctgggctcaatcaatcctcctgcctcagcctcccaagtatctggttctacaggcacacaccactgtgctccgattcttcctgcattttttttttttgagacagcgtctcactctgttgccaggctggagtgcagtggcacgatctcagctcactgcaacctccgcctcccaggttcaagcgatttttatgcctcagcctcccaagtagctgggactacgggcggacgccaccatgcccagctaatttttgtatttttagtagagacagg[131 bp omitted]tcaaaactcttaatctctgcgactcattttaccctttcatttggggcagagaagaaagggaaaagtgtgtaaatcaatagaactggaagtggtgtctatcccgtgtgttgcgtggctaagcaaggcacccagccccaggcccagggaatgagactctatcgatgcactgatgggcaccgagagccaatctgagcctgggtcccatcaccccacccctgtataagccacaggaagcttcctgaagctgtcaaagggcgctcaaatgagtgtcccacttctatggagccaagggctgaagaggccatgctagaagccgctgtcccatcaaggccccaggcctgtaccacagccaggtccctcctgctagcagtttggcaagaagggtccttggcagaggccccaactctggattaatattacaccaagagaacccaaacaaatggctcctgactttcacgctccataaagttctgaggcttaaaataaagatgagtttggaggggagggggtgtcaacaatagtcagcatagcagagccacaggatgaaacactgtacagccacttaaaagagtgtttaaaaccacaccgttccattaaaaattctcattatgtagtgttacaccaaaaagctagattcaaaggtatgtaaatcagtaagatcacaactagtttttaaaacttgtgcacattaaaaaaaaaaaaaagaacagagggaaatataaccaaatgttttcagccgtagtactgaaattatcagaatgatcaattttactggaaattaaacattttccagtttttctttaacgagcatgtaaactacccagggggcaaggggaacacattctgactaaaatccgtgtgactgagaagtcaggatgaagagctgctgggatggaataaacccctccaggcagccccgagcaatgagatgggacaggcacagctgtaatctagaggccctcgggctctgctgtggtcacacctaaacaagcaagccagtgcggtacccttcccaaggggcagaagttctccagggaacataaccaaaagcccattagcccttagagtgctctaaagaagtttggcaaagacactgcagtgaaacacagcctgctcaggtgctctgccccaggcaaagagacagaagacagctgccgctgcagggtccagtgtccctgagagacccccagcagacgaagatccctgccagtgccgccacccccaagcatgaggatataaaagagataagcttcaccatctggggcacaggagcctcctgggaatgcctgcctgaatgagggagaatggcaggtccctaagccatgtgcaaatgtgaaggaggaagagggtcaaaagagaaggagccacagcagctgtctctaaaagaacactaattacagggccgtcctcccttacccaggcctggtactgccagcaaagatgctctcgagctcagcgttcacctgaccgcctgtcctctgccacctgtggttggcccagaggtggcaagggtggtctggctggggctgcaggcctgatggctccccaagctgggtggggaggccccaagcccagcttactgggaagtcctcatcctagggtcaggggccctgtgccaggagaccctggaacatggggataactagagaacttccttctctggaaatgttagagacccaccaatactggaatggaaaaagtgacgtattcatccctcaaagttgcgagaggggcagagtcaagtgcagaggtgagaaatgccagttctccaggggtccctcacctgccactcatagcaaggagctcaagttcaccatcaccaaaggtgcctctgcatggcctcctgctgctggcattttgctgagacactggagaggaccgaaaaaggcccacaccaagccaaaaaggtgggcaggaggaaagagcattggcctagcagtcagactagccggatcttgtccccattcaagccccttcaccccctgaaataggtgtgattcccatcctagatactacatcaaaacatttacagatcggtgagaaatgtatgggatgggacttctaaaaacaaccaaattctggccgggtgcagtggctcacacctgtgtaatgccagcaatttgggaggctgaggtgagtggatcacttgaggccaagagttcaagaccagcctggacaacatagcaagaccctgtctctatttacaaattttaaaataaaaaataaatttaaagctgtcaaattctaaacaaatggaaagtgtggttaagatgcacgggaagtcattataaagtgaaggcattttgcttctctttcaggacaatatgcaaattagaggcaaaaatataaccacatcgtttttcttttcaaaccactcatgtatccaccataaaacagagttatggggctgcttctggaacataggaaatggggctcagcggctggtgccacaccgggcctcttggaccaaagcgggaaaggaatgactcagacagggaaaggaagagacaaaaccaatgaaacaggaggaaacgtagggaggttggaacccagcatctctgagaaagaggcccagatgaaagggaggcgcagctgggggaaacaggccggcaattgtttgtagggatggccggccctgctgctttgtgtgttaatgtaattaagggctcagtgggggccaatgtttagaatcctttaactccctgccattctcaccgagcggctgggacagagagtggggctgttatggagggtgccaatgggtttctgggcagctcacttaaaagggcatccaggggcaggcgggcctgggcagcaggaggtgaagccctcattccagggtgcctgagaggcacttcctcctcctccccactccccccgggagtctccagaagccctgccattgccctgaccccagttaacactcctggtaattgctggggctgctgcagaaagcctagggagaaagaaaaaaaaaaaaaagccagagttagagagagaaaaaaaagtctgcttctccagtgttcattgaggcttccctcctgcccacaccctctgggttggggcatccagtttcaaggaagctcccaaggcagggctctccatgcctgaagccaaaatcaacaacagcacatggaaattactgaataggagcagctgggtttagcaggcttctaggagccctgctccaaagctcccaacccctcaaatttccaagaggtatgtcaggggatctgccccccaaccccactcatccaaagaaagcctcacattaacccacagcccaataacctgttgctctgcaacaaagacagtgcaagttcttgctaccaacatgagattcctctggatggcaatggacattctgtaggcaaaacaattcatgcaatgtaagctttaaaaatattatcccatctaacttcacaactaccctgtaaggtcggtactgttctttcctccactttatagatggggaaactgaggcttagagagactaaatagctgtacccaaggttaacaagcccacaagtagcagaggaaggattcaaaccctggcaccctgactccaaagcctgtgtatttaacccctagtctatgccacagggcactcaggtagtcactgggcagtggaaacacgccttgtgaagcttacagcctggcacaaggttcttagcgaaggctctgtgagatttctgtgaggtctatggaacccctcgtcccaaaaatcgaatgcaatttaatgtgtttgtgtgtgcctatgctttttgggaggggtgtcaaagttctctttagattatccacaggatctgggaccggaaaaaagcttaagaacctagggccgatgggcgtggtggctcacgcctataatcccagcactttgggaggccgaggtgggcggatcaccaggtcaggagatcgagaccatcctggctaacacggtgaaaccccatctctactaaaaatacaaaaaattagccaggcgtggtggcgggtgcctgtagtcccagctactcgggaggctgaggcaggagaatggcgtgaacccagaaggtggc[131 bp omitted]tctagaacacagatcttccgatttgagtcctctacgttttcacgcaacctctttgctatcaagaaatagcgaagagggcaacttgagtttctccagaaagggagaatatactggcattcgagaattagaggtacctggcactgaaagtccacccagcctgcctgggagacagtatccaggatataaactcggggtggggggcgggagggaaagggttaagagtcaggtcctgtgggattaaaggatttcctactctgtgtttattacttctttccatcacttaaaaacaagttccaacattgtcccaattctgatcctgggttttacttggatccacactgagaaaaataattcattacggcagccccaaactatcagaaattagcaggcggggaaaaaaagtttccattccatactaatttgccacagttttaaaggccaccgtctgtctaaaaacaagggtgttccttaactgaggccattgtcctcatttccagatgctccaagacagcaaacaatgacaatgatgctgctgccaacatttgacacccaatattatcaagcccaaattctgtgtgctgggctcttaacgataagctttacccaaacttatctcatttaatcctcacccctgccctatgaggcaggggcattatcatctccaatttagagatgacaaaattaagccccagagaggttaaacagccgcccaagaacacaccgcaagtcagtgacagtgccaggattcaaacctggatctatctgaccccaaagacagggctctagaccagggccactaaaagtatgtccacagaccacctacaaactgttagttgtgggtccttaccaaataagtagagaaaaagaaaggaaggaaggattttaaaatgtttctagcaatctgaccttagcacaatatccaagcatgtgatctgtggacttccctcttagaacagggtatagaccagtctggatgttctcagactggctcagactggtcatgctcatcggttcctgaactaaggaatagagcatattgtccttcacctcagatactttgagaagcactgttttaaagcactgcaaagacgggtcatacaagacactcaaacaaggttcagcacgtccccagctgtccctgcagcatccaaagtcttctagcacagcgcttctcagtctgtctctctctctctttttcttttttgagacggagtttcgctcttgttgcccaggctggagtgcagtggcgcgatcttggctcactgcaacctccgcctcccaggttcaagcaattctcctgcctcagcctcccgagtagctgggattacaggcaggcaccaccacgcccagcaaattttttttgtatttagtaga[153 bp omitted]cttgttaaaatgtagatagattcaggaagttcaaggtggggcccgtgattctccatttctaaccaggtgatgtcagcgctgctggtctagggacctgactttgggtagcaagtctccaactgcacaagcagaccagagccaacgaggctgatgctgtgaactccacctggcaaacaagtcggactccagcaaaggctcaccagttagcactggctgtgaggaggccagaaggtagcccttacaaacacctttccccaactccaggctgagtctgggatgcccaggggcccttttatcctgagtcagaaaccaaagccctctccgtcccaggggtttaacagaaggcagagaaaagcagctcagaagcacttgcaaacattgcgaggaacgctacccacaaccacagcaagaggagggaggattttgagaaaactgtgcccacttctttggttctgctcaagccagactgaagctgggtctccaacagtgatggcctgggagaatcactacacacgtgtgtttggacagcactttctacttcttaaaaagaagatatccacatctatcgtgaaagctgagaaatctaagagctggaagcctgggaggaagggatgtgctgtggccaacacaggagggcagaaatgacccctctgtgaccgctcctgtagccagaaagagccacaaacagtccaactccaaaggggaaatggtccccatttcctgcaggtaaccttctcatgacctgctctactccctggaaattcttgacactaaaggacactaaagaccttcttccttagtgccaacctcagtctctcctagttccatttctggcacaaggactgaatgacttattaaaggagctggccgggtgtggtggctcctgtctgtaatcccagcacttaaggaagctgagacaggcagattactcgagctcaggagttcgagaccagtctgggcaacatggcaaaacagggtctctacaaaaaatacaaaaattagctggaggtggtggcacacacctataatctcagttacttgggggctgaagtgtgggatcatctgagcctgggaagtcgaggctgcagtgagctgtgttcacactccagcctgggtgactaagtgacatcctgtctcaaaaaaaagaaagaaagaaaaaagaaacaaacaaaaaaagagggagaggtacaattcgcaggaaaaaccccagatctcccattcattccgggcagtcgctcattcattcaaaaacactgatgaagccactgccacatgccgggcactgtcaggaagtgggcatagaggcacaggctggggccttctccttaccctcctctaaagaagtggggaataagcaaaaaaggggtcatgagggcattaactaagtcaaagggcactgctgttcctgcagtggggggaaagagagttcctgggcagaagctctcacatatgcatggactcagggaaagccagtccgagggtgagactgggtattcaagttgatggtggctgacagatctccttctctttactcacacagggccaagaaaggcctgagggttaggaacacacaaaggaacacagtcagagggacttcatgtcccaaccaaaggtgtctcaataagacacagtcccgaatccagggaggatccggctgaaaagcctcctctggattgcagaggactcccgtgaaaccacgagcctctttctcctttgcaaaaatcaaatcgtattctcccacctccaaaccctgccatgtgctgcttccctacacgatgcccccaccctgctcctctcacccacatgtgtccttccctctctcagaattctgcttaaaacgcatctctaggctgggagtggtagctcatgcctgtaatcccagcactttggcaggctgaggcaggcacatcgcctgaggttaggagttcgaaaccagcctggccaacacggtgaaatcccgtctccactaaaaacacacacacacacacaaaatagctgggtgtcgtggtacatgcctgtaatcccagctactcggaaggctgaggcacaagaatctcttgaacccgggaggtggaggttgcagtgagccgagatcgcgcgacagcactccagcctgggcaacaaagtgacactgtgtctcaaaaaaaaaaaaaaaaaaaaaaggccaggca[136 bp omitted]ggcagcgggtgctgtagtcccagttactcgggaggccgaggcaggagaatgttgtgaacccaggaggcagagct[137 bp omitted]cagatcagcctggccaacatggtgaaaccccatctctactaaaaatacaaaaattagctgcgcgtggtggcaggctcctgtaatcccagctacttgggaggctgaggcaggagaattgcttgaacccaggaggcagaggttgcagtgagccgagattgtgccactgcactctggcctgggcaacaagagcaaaactctgtcttaaaaaaaaaaaaaagtctggtccaggcgctagagcaagggttctcaaccttaggcactattgacatttgggctagagagtaaggggctgtcctgtatattggaagatgttgagcagcatccctggcctctacccacaaatgccagtagcaacatcacccccagttgtaacactgccaatgtctcctggggggccagatgatccccacttgtgaaccactgcactagatagatggttctcaaccctggctgcccaatagaaacacctgggcaatgtataaaatttacccctgcctgggccccacccagcactagcagaatcagacagcctcacgggcagcaaggggggagaaccactgaacagagctgctctggacattttggatctcttagccagtctaagattctacaagtaaacaacaatgtctgtaactttatatagccttgatgttctaacgtgttggtcggttcctccattagaccaaatctctccagaagcaggaaccatatcttctttttccctgtctccacaaagctgtatgcagtgcctcttattttatactaatcaaaaaagctgggcaagttcatgagcccccctccaccccaatttcagatgaagaagccactttcatctcccccagttcaacagcatatgacaagggagaatttgcaaagggaggaagggacagaagagatgggaatccaggaggacccagccacctgatctagccttggaacgagactgctctctgccagctgtggggaaagcttgctgagttgcagggatgcagggctaggtatactcatacttcctcagccccacctctcccggccagactggaaggcatgaagctggggtcttcagcagtaaactctagtctaccagatcggatgctgcattccccaggccgacagtgactcgagaacaaatgaacacaggcccagaacacctctatttggagcccgacttatgggctgggatctttctccctacacctccttcaagactccccaggagcatctggggacctggctgagagaggccagcccaatgttaacagatgcagtcatatctgcctcctgctcccctccccatcctgctcaccacctcttcagacaaggcaaagaggaatgcagtgtcaagaaagaatatttaaagccaaggtgggaggactgcttgagcccaggagtttgagaccagcctgggctgggcaacatagtgagacctcttctctacaatataaaaataaaggccaggtgcggtggctcacacctctaatcccaacactttgggaggccaaggcaggaggatcatgaggtcaggaattcaagaccagcctggctagtatggtgaaagcccgtctctactaaaaatacaaaaattagccaggcgtggtgacacgtgcctatagtcccagctactcgggaggctgaggcaggagaattgcttgaacccaggagtcggaggttgcagtgagccaagatcacaccactgcactccagcctgggaaacagagcaagactccgtctcaaaaataaaaataaaaatagccggacatggtggtgcacacctgtagtctcagctacttgggaggctgaggcaggggtatagcttgagcccacaaattccaggttatagtgagccattactgtgacactgtactccagcctaggcaatatagcaagaccctgtctctctaaaaaaaaaaaaaaaaaaaaaaaaaaaggaaagaaagacaatatttggatatgaacccctatcttttttaagaagtggaagtgcatttgctatctactcattccttaacagatacatagagaatacttagaggggcagacatgccatccttcccgattgtttttttgagacagaatctcactctgttgcccaggctggcatgcagtggcgtgatttcggctcactgcagcctctacctcccagattcaaacaattctcatgcctcagcctcccgagtagctgggattacaggcatgccccaccatgcccagctaatttttgtatttttaatagagacagggtttcgccatgttgctcaggctggtctcgaactcctgagctcaggtgatccacctgcctcagcctcccaaagtgctgggattacaggcatgagccaccacacccagcccgttccccatttttatacttgggttaagctcacagacaaaatgatggggatagaatccagggaccaagctccccaagacagcaaaggctattcaagtgcccgcaatcagctttcttactaaaactcactgactaatacacaagaatgcaaactgccaatgtgtttaccttacatttaatgaatggtttagtgttttctctgagattttacttatttgatattccatgacaacaggatgagcaatccttaaagacctgcttcaggcagccctggctggcttgctgaaatcagtgtagagcagtgaaggcttccatcctgagtgaccagcgtgacagtgatttttttttttaagcttccctcccttccattagacacacacacacacacacacacacacaaacacacacacacacaccctgttgcctagagactggacacattcctggtgcttactcttcttttcattctccagaagcaggagctttagaaactggggcctccaggaaatatgcctggggccggggtgaagggggtccaggagtgacatttcctcatagccaggcccgccccatccccgctgccctccctttcctcccgaggtttgaaaagccccagcaggctggaactgaaaggcttccacagggaacaaaacaaggccccctttgaaagcctgtgtttaccccgggtgcagccaggggttgccatggccacggtccaccttggcgggccaggcccgcctggagcagcctcagcgcctggccgtcccaccccaattccttcctaggggaccctactggcacccctctcctgggcccccttgactgctggaagcatggattttcatcaagtcccccaagctgaaaacataatcctggagagactgaaagaggattaagcctccctctggggctcctgagagaaagaccaggggacttgaccagccctgtccacacccacctccgctgttgctgtcctgtctcctgggccagtgacccacccgctgctaatgagaatgacttatttatgtcattcattatcgctatgtcctggagccaagcagcatcaggggaggccagaccaggagtggggcaaagaggaaagggagggtctctcctctcagcctcaacctgaatctgtcaggccctgtgggctgcgggaaaccacagaggccttgtgacccaaggacaaaagcggctgaggacatggcaggacagtgtggactcccagggcccctgagtgcacaagcctggccagggaagctcagccctccctggctccacattcctcctttggcccttccccaggagaagccagagggagcagaggctctaaataattcagccctccaattgctctgtggtcagagcttcttcatttattttttaactctccaggctccacagtttcgcaatggaagcactctaatcccagccctcacaaccaggtgcctctcaagcccccagcccaggatggcagggaaggaggcacccaacttctaggattctgcagactcatccctaaggttcaacacatcttgaggcctcagggacagtggctgggatgcagatgggcagcgggaggagaggaggcagtgctggctccagggctgtttccacagagcatggcactactgtgctggcagaactggattaatagaaagacctgagccgcaacccgggtgaggctcagatccacctctgtcagcagctccactctcctgcgcactgctcctctagcctcctatctatcctttctcagggcttcttcctgcacccccagcccatcccgcccccatacagccctccacgttcattcacactttttttttttttgaaacggtgtctcgctgtatcaccacgctggagtacagtggcgtgatctcggctcactgcaacctccgcctcctgggttcaagcgattctcctgcctcagcctcccaagtagctggaactacaggcatacaccaccacgtcaagctaatttttgtatttttagtagagacagggttt[131 bp omitted]ccctgccatggttccctggaatcagcctggcctcagcttctattaataatattagttaacatttgattgcacattcatttcatgtgatcctcacagtaaccacacaaagcaggtactatggatatcctcatttcacaaatgaggaaactaaaactcagggaggtttagaaatctgcccagaggcctggcgtggtggctcacacctgtcatcccaacactttgggaagccgagttgggaggatcacttgagcccaggggttcaagaccagcctgggaaacatggtgaaatctcatctctacaaaaaatacaaaaattagtgagatgtggcagcatgcaccggtagtcccagctactcaggaggctgaggcaggaggatgcttgaacctgggaggtctaggttgcagtaagccgagactgtgccactgcactccagcctgggtgacaaagtgagaccctgtctcaaaaaaaaaaaaacagaaaaagaaaaaaatctgcctagaggctgggcacagtggctcctgcctataatctcaacactttaggagattggtaggatcaccagcctgggcaacatagcaagaccctatctctacaaataatttttaaaattagtcaggcatggtggtgagtgcctgtagtcccagctactcagggaagctgaggtgggaaaaccccttgagcccaggggatccaggctgcagtgagctgtgatggtgctactgcactccagctgggacgacagagagagacctagtctcaagaaaaactaaaaaataaatctaaaattctgcctaggtaggaaataagcatgagaagccaaaaaataaaataaaataattgtaataaaaaatttgttataatctgcctaagtcacacagagagtgaagaacaagactcaaagccagctgcctaatcccagtcttcaggccttaactcccatgctatatggacacaggctgcacacacaggatcctcaagcccagagtcacaggcacacagccagttgagacagtctagggacaaggactttggtctagggaccaaagtgccatatccggcctaacatcctttctccattacacagtttcaagtgtagaagcatctgtatttacgcaggtgataaatacacgtttactctctggtttatgatgtcatggcctaacgccctataaacctagcttaaccccagcaatgccctgtgctggccccggccctgactactccctcccatccctgctccatggccttccaacaaacagctcgcctgcctccaccaagacttttaaattctccctcacagcgttataatccttcccatgcccctttagggcagtacaatctccatgattcctaatgagagagctggcagcaccataccagagcacacatatgcaatacctgatagttctcagtgttcttacagacattacccagccagctcagcaaccctgaaccagctaaacatggacaacagctttttattttatttttaaattttatttatttattatttatttatttatttatttttaagacagagttttgctcttgttgcacaggctggagtgcagtggcgctatctcagctcagcgcaacctctgcctcccgggttcgagcgattctcctgcctcagcctcctgagtagctgggattacaggcatgtgccaccacgcccggctaattttatatttttggtagagatggggtttttccatgttggtcaggctggtctcgaacttctgacctcaggtgatctgcctgcctcagcctccaaaatgctgggattacaggcacgagccaccgtgcccagcctttttttttttttttttttttttttgaaaaggagtctcactctgtcacccaagcaggagtgcaatggcatgatcctggctcactgcaacctccaccttctgggttcaagcgattctcctgcctcagcctccagagtagctgggactacaggagtgtgacaccatgcctggctaatttttgtattttagtagagacgggctttcaccttgttggccaggctgatcttgaactcctgacctcaagtgatctgcctgccttggccccccaaagtgctgggattgcaggcatgagccaccatgcccggtctagctttttatttttttgagacgagatctcagtctgggtgaagactggagtgcagtggaacaatcccggctcaccgcagccttgaactcctgggctcaggtgatcctcccacctcagcctcccaagtagctgggactacaggcacacatcaccacgcccagctaatttttcaaattatgtgtagagatgtgggtggggggagagggtctcactatgttgcccaggctggtctcgaactcctgacctcaagtgatcctcccaccttggccccccagagtgctgacattacaggcgtgaaccatttcgcctgacctgaacagcttctggacgtgtctggccagctcatatccctcctgtgaggaccgcctctactcccattcacaggggaaagctcctaccccctggtgctgcgtgatcatgccctcctggccccagctgactggcccagtggtagacagctgatccacacaagcccatcagactctctcctcaggagttcacatcaaggctcagacaccattcagtaactaagggttactggaaagtggacgggtgtatttgggagctgaggggccataccacctggtgcacatccacagcagcagcggcgtcctgcaggtgcaccatgcagactcactgagaacagctgcgtcagccacccccaccacacccccacacacccccggcacttgggagaccaggcacttcctcctttgagtcttcaattcccctatggcttcaaatagctcgagctggtttctgttacttgccttcagtagagtctgaactgagagacaagctggcatcactatcctccctgtacagatgaggaaagaggctctagaggtgactaaatcaacatcatatagtcaacatgtaataaaggagccgttaaaaaccctgccatgtgactcttcttcagtgccatcccatgcctccttccctggattaaaggaagtggcaggtattccatttctgtcagtgtttaaaaaaaaaaaaaaaaatggtggcacagtaagcgattcagccagaggcactccaatggactgaagctggaaacaagaaattcaaaatcctctcctttagatcggcaaagacagctcttctctcctctacatttgccagccttccttgcagtgaggtcggccccatgtgaccagctctggacaatgtgaatggaagtaacaggtgtcagtttcctccatctctctcctcccctcccgcagtaaccttgaaggccctatattccagatgatgtggctacagatggaggtgcactgcctgacctacaagactttccacgagcaaaaaataaacctagatggtgtcaagcccctgggatgtcaggatttgattattcctgcagcataatccagcctctcctgactaaagcacaggaatttttcagcctgggcccttcagcaggatgctgcattcatttgtttaacattcatctgtttaacaaatatttctggagcaacagtgccaggtgctgtcatgggtataatcaagggcacagtagtttttaaaaaaatacaataactacccttaggaagcaccctatctggtgactcataagccccacttgggactaaaagaaacagttctacaggtgcaaagcagaactcccacgcagcccctggctaacctgagccccagagaagctaagctgccaggaggcaaagacagcttgtcctagtgactccaggagggtggcagccaagagtgagttcacaccaggctttcacacccaaggctctaccaactctactcctgccagccgtgtggctgtagacaagtgcttcccttgctctgggcgcagacacatgggagaaggcatcaaggaggagtcatcaagagagcaggtggctgatggaaaacagaagccgcaaaagacaccactcatcttccccaccctcctctgcagccgaaatgtctcctctgggaatcatctccctgtttcattttaactggaaaagtcccccatgactgagcttttctccccctatcccacatagcagaggactgagcagagaagtcattattctgtcaggaactggtgtctgggtatagtctcctttctttatgccaaaagctagataaaagttaggtagacagggttgccatatacagttatgcaggctgttcactacaacgtgcccatccaaaggggcaaatggagctcaaatccagcctacactctgcctaccaagctgtgtgacctacaggaagagcaccttcttctaattcacccaaaggtgtctgctgtatgccacagaagaactggagccagggcttctccataacagcaaagggaagttactatactaacctctctacttttgtagatgtttgacatttttcacagtaaaaggttaaaaccaaaaccaaataaacacctcaccaagtgagtgggtgtgttacttggccaggttacttaaccctcagcctcagttcccacatccaaaaagacaataatcgctggctcctagggtcagtataaggactaaactaaattacataagtagcatgtttgacatggagcaagtcctcttacaaatgggaactattaacagtagccactgctgatggctggggccaggaaggaaaacgaggtgaatggggacagagggacattgtctaaaaaagcaagcctttgggaaatgtgtgtggagaagccagagtccgaaaataagaccaccctattcatgttcctaaattgagcctggggggcagggctggtctgaaggagttctcatgcaaccccttcttcggtggcagcctttacacttccctggggaccccaggctcggctcagaatccaaattaaggtcagtgatccacagaaaggccacaaagagtggcttagaaaaggatgtgctcccggcctcccggcaaactcagagaagggcccggcagctgggaggtggagctggctgggctgggagtgctcacatctgaagtcctgaaagagaacaggacttttcctaagatgttccaggaggtcagccattagcacagagaggacacctgccaccttcatggggtgcgaatggcccactcacatccctgtaggtcaaaaac[141 bp omitted]gattctcctgcctcagcctcccaagtagctgacactacaagcatgcaccaccacacccagctaatttttgtactgttactagagatgggctttcaccatgttggccaggctggtcttgaactcctgacctcaggtgatccacccgccttggtctcccaaagtgctggtattacaggcgtgagccaccacacccggccaaattgtctagttttatga[221 bp omitted]gaggcaggagaatggcatgaacccaggaggcggagcttgcagtgagccgagatcgcgccactgcactccagcctgggtgacggagtgagactctgtctcaaaacaaaacaaaaacaaaaatgatcactgctatatgtgaattttaccagtagtctatttttaacgacatgcctccctattcttttcccttcaaggccttaggttccagagccttaccaggatgagagggctgatggtgacagtggcagtgaccggaagctgggagcccttcccaaagcccctggagggaactcaccactagcacgaaccgccaaggccctgggtgccagcctagtgcccgccctaggagactgacatggaaggcttctggcttcagtcaaatgccatctcactcatttgcctctcctttctttcttttccagaattaaagctcataggatgattcattctcttattaaatcagctcatgagaaaaagggaagtcacccgagttcccatccctctctccaccaaacataagccacgctgtggctcattccccatatgcatttaatagaaatgctaccacaaggaagaaattccactaagaaccccacccttcacctttcctttcatgtctcaagaattcaccatccatggcagttttctaagtttctaaggctgccagggggagaggtgagttggaatttaaagataagttcccaaataaaatgggataggaggggaaagagtcacgtggctcttaaatccacatacatgcaaccctcaaagcagatagtaaaaatccaccccaaaaaaaatccttctctatctctgccagatctcctcagctctgccccacacttagaaacagctgtttccccagaactccaaaaaaaactctcatatattccatccctcattgtttccaagactgtgatctgtacacttaatctacctctaggctcagtttatccctccctgggactgtcaaacaagaacagtaacagtcaaagaataagaatcctaacgctacaatattgtaaatacatctatggactcagcctcctggctttggagctcagatcctgcctcctcagctaactagcagtgtgaccttacgcaagttaacttaacctctctgtgcctcggtctcctcctgcataaagtgatgatactactgtctcatctaggattgattacataaattaatattcccaagatgcttagaaagcttactggcatatgcagtaagcatgcaataaatgttagttattattatttatttttttatatatatatatttttttttttttttttgagacggagcttcgctcttgttgcacaggctggtgtgcaatggtgcgatctcggctcactgcaacctctgcctcccaggttcaagtgattctcctgcctcagcctcctgcgtagctgggattacaggcatgcgccaccacgcccggctaattttgtatttttagtagagacagggtttctccat[137 bp omitted]agagattattcttaccagctctatttaacatatgtagtcaatagccatgtgttgttgtggagtataataatagattagcctcaagaaaactataaattaacaaactaagtgacctgctcagaatgacacagcccacacatggcagagctaagactggaactccagtcatcaactcctttgcacactcacacatttcacactttaacacactgtctccttcaggcatggagatttgagaagtcccacggatcagcatcaagaacagatttcaatctctacagagcgacagtatctccaggaatctttcaagattcaccaaacaaaattcatttccattcgtcttcatattccacgaaaacacaccaaagctgccttagggagagggtgtcgccccatcagaggtgtcaaggaccatgcaaggccaggggtcacactggcctcaacaatgtttcagacaaaaacggctcccttgggaggctccgaggctgtcatcgatttgctaaaggtcagtacggatcatttgggaatggatttgtgtaggcatggcctaagacacatggacttctgccaagcctatatatttttttcaaaacatctgcactgtcttcacccttgataaatagcagccaggctacagaaatatttccattacgcacaaaagcctgctttgccaccacaactcattgaaatggatgtttccaacttgagaagaactcttcaatgaaaacatctaaaaacaccccaatcttccagcagaggcaaccaatctagcattcaggaaacctttaaacactagtaaataatatttgtggaaacaaattctttggtagacatatgcccccatgcccaaagtctaactatatctaataaataggttaagcccatttcttctagctgtattatgaacattcatgcaaagacatccgcataaacatttttgtaaaggttttcccatatttccagaatgtggtgaaatctccttatggccatgctgaaaagaattggaataaaaagaatttaacattgtagccctggctttaccactaagtagctgtgtgatttcacaaaatgaaaataataacaataacagcagcagctaacatttaatgaggacttacaatatgcaaaacattgtgctaggggcttaataagtatttggtagtaattaacaatcattatgtaatattttggccgggcgtggtggctcatacctataatcccagcactttgggaggctgaggtgggcggatcagttgaggtcaggagttcaagaccagcctggccaacatggtgaaacactgtctctactaaaaatacaaaaattagctgggcatggggtaatggagggcgcctgtaatcccagctactcaggaggctgagacaggagaattacttgaacccgggcgggtggaggctgtgggtgacagagcaagactccacctcaaaaataaaaaataaaaaaaaaacaccaaaaaaccatttggtaatattattactcccactgtatggatcaggaaactaagactcagagagattgagtaacttgccccaagaacacagcagcaactagcagaggctgggatgaagcacaggcattctgattcagtattcttaattacataccattggtcttttcaaagcacttaacgacccacaacctcagattcctccaggagccaaccaagcaagcagtcttcagaatcctttccagctgtaaaattcagtgattctctcttttcaaaataaaatgaatttataactttgagaaataaaatgtaatgatgctctagtactgctgagggaaggaaacatctgtgtatgcctcacccagaaccagtcaggggaggaaaactgctgattttctagggtaatgatgtcctgtgaaccaaccagactggcctcaagccgtctcaggaaaaatgacagcttgaagttctcaaaggatccaccaacatgcaaaggtctgcaagttcgcaactatcagttctcaaactttaatttgacttttttttttttaaaggaaactcatatgcaagaaaatgctgcaccgtagaggctgatcttaagaatgccagtacaagatgtatgttgactctgtggcatgctcacacttgctttcctttcaggtgtacacctgctcagggaaaatccacccggcccaggcaatctgttttaagacttccctagctcgaggctcagtggtcctgtaattgggtgggggttttgtcctttgcacatctgatatcttcatacgctccctcctgctcatcatcaccagcccggtctctggacacacaaacacgcaagtgctgccttccccaactccatctcggacgcatcttcttcctctctctgctcaacacaggagttccctgttcacacaccttgccattggctgacacagccaatggtgaaactcccccagctgaccctccctggagctcactagctctctcccagctgtgggtacagcctgaaaccgaaactaatctcagaccagagcaaagtgaaatcatttcaggagcctgatcaccctacatgaccacagagaggcttccccttaacagagctccaaatccagcttgctggtcaccaggagaaaaaaaaaaaaaaaaagctttgcagtgccctcctaacatcaaatactttcttaatgaatagggaatcatgggattagaggaggaagcaaaagttcttgccgtcgtgtttgctgctgctacttctctcttatttgcacaagtctatttcagttcaccccgtgagctaaagttcaccacccggtattatttttaaactcattgtccagcatccgttcatatttggttcactcttaatcagattatcttccaagagcaagctttgttctcttctgagatccctgtaaccatcttgctgtaatgtggctgagactgttatactacatgtttttcgtaaatttgaaaaacgaagcgttttacttttgtgctcgagccaggcacggtggctcacacctgtaatcccagtactttgggaggctaaggcgagtggatctcttgagctcaggagttcgagaccagccaggccaacatggtgaaactccatctttactaaaaacacaaaaaaattagctgtttgtgatggcgtatgtctgtaatcccagcttctcgggaggctgagacacaagaatcatttgaaactgggaggcagaggttgcagtgagctgagatcacaccacactgcactccagcctgggtgaaagagcaagaccctgtctcataaataaataaataataaaaaataaaaacacttttgtgcttggaacaatacaaaagaaaaaaagcaaaagccattatgactgaacataatgtcaggccttgatgatccttcaaagaagtataaatgttgagaaggatcctaaactgtgttttctcttcttacccttgcccccagcatacttgtgggcagctttctttgtggctaggcagtattatgaaaaaaagcctactgtcagcttaagcaaaacagaataagaagggttaagtgcactggcctaacaagggtatggtcaaagagaaattaagtcttggattatctgttatttactcattcatccaacaaagtttactgagggcctcatatatatgcctaaaactcttctaggtgcatctaggagataacccactagctccaactgagagtgccattctcagaaacactgtgtgtatgggggctgatgctttctgtattccaataccaagacaaatgctccactacttccaggtttcctgagctctcctcacacggcttggactccatccccgagagctgtaggtccctcccagtgagcacccccgggtgatgctgaccaggaacattgcgggccagggtcacctggcccagagctgttgggcagactctgtttgtgccttggctcactcattcatggatgagctgctcagtgttatcgggcattcttcaatcactccaacagtcaaaggaggggttaggccaaatttaagtaatcttctagctcaaaaattccagctccttttatcctccgatcaccgagctgacatggacctctaggggcctctacttcatcttcctgtctccagatgaaacctcttaaaccacaaagacaaatgaaacttgttcccatttctgaagaccttcaggggaggccattcccctctgtgcctatgagtcacttttcttacatctcacatcctatctggaatgtcttcctcataccttacttgaatcctccctctgtagtttaaattcatttgcctctggttctaagtgcagagagacaagagtgaatcactgtgttctgagcaatgactcttaagggacttttatgtcttcttcaccatgttcactgcaggcattacaagaggtggcagtgtttctcagctgttaaaaaccacaaaggcatcaggaaagctgaccacactgcccagttcctgcctcaccctggcaagggtgctacagaatccagaaaacctgacccttctctgaaacccacaccgctacttagctctactcagagttcaccaagggggagaacaatgtgctcccatgccagatcaaaagcccaggaggcagcagccactttatcttgtcctcactcagctcaagcggcccctcctccaggaagccttccctgccccaactcctcttctggctggcaaagtgcccccttcctcagtgctttgtcttatcgcagcacttgccacagaaactgaaattccaggctaacatgtttgtctcccttactagacaggaggcatcttgaaggcaggggccatggcttgatgacctttgtgctccaggatgggccccagcagagtatctggcacttggccagtggttctcagcagactctgttaagctgaaccctccaggcatgttccaacgatgcctggacattgcactggcagcccttcaagcaggacacaaatcccacaacccccccagctccaccctcccccaccacgaccacccccgagctcagtaggggtgtctctgacatacttttttttttttttttttttttttttgaggtagggtcttgctctgacacccaggctggagtgcagtggtgcaatttcagctcactgcaacctcggcctcccaggctcaagcgatcctcccacctacgcctcctgagtagctgggactacagatacatgccaccacgcctagctaatttttgtagagatgaggtttcaccatgttgcccaggctggtttagaactcttgagctcaagtgatctgccaacctcagtctctcaaagtgctaggattacaggcatgaactaccacacccagccctgacagtttctctaagggtgtgggcctgcagccagacttcctgaattcaaatcctggctctgccactttctagccatgtgatcttgggcaagttatttaaactcttgatgtctcttatgtctctatttcttcacctgaaaaattggtataatatctcataggtcctgtgaagattcaacgagctaatccatgtgaagtacttggaaagggtccgacccctctgtgagtgctgcaatgattatttcccaagcctatcccttcacagaaacccttggcccccacagcttccactcttttcgtttttgagacagagtctcactctgtcacccaggctggagtgtagtggcgcgatctcggctcactgcaacttctgcctcctgggttcaagcgattctcctgcctcagcttcccaagtagctgggactacaggcgcctgccgccaaacctggataatttttttgtactttagtagagacgggggtttcaccatgttgcccaggttggtcttcaactcctgagctcaggcaatctgcctgcctcagcctgctaaagtgctaggatta[149 bp omitted]attctcctgcctcagcctcctgggtagctgagattacaggcgcccaccaccatgcccggctaatttttgtatttttagtagagacagggt[145 bp omitted]tcctgactaggttcccttcctccagggaactctgccctgttcctctggaccaatgttagtattaactttatgccattcaacccttctcactggttatgcctcctcacccctcccccagcttacagggcaaattctccaaagaaaaggaaaaagagttggttccacagcagggctacagatgctgagtcattctgcccccaaatatgcttagctgtcacccatgacatttcagtctccccacccccgcctccactgtgcggtcctctctgctcatcattcaagagcctcaccccaccccctcccactcttccaaaatccaccctcagcctctacagtttttaccaaagattttccttaataatgagcctcagaatttgtgtaccgctgtgcagaaatggcaataataataatagcttcgatgtaatgaacacttcctctttgtctggcatacacatgagatctcttttaactctttctaaatataggaaactctggcacttacaaagtcttagagtaagatggagagctgggattctacctggagatgcctaacttcagatcttacactctaaacaactaagctatgatgaaaatgtgcacaaaataactcagttgcttcctgggggtggaagttaagccagtggagttggaacttttttttttttgagacagagtctcactctgttgtccaggctagagtccagtggtgcaatctcagctcactgcaacctccgcctcccgagttcaaatgattctcctgcctcagcctcccaagtagctggggttacaagtacgcaccaccatgcccggctaattttttgtatttttagtagagataggtttcaccatgttggccaggctggtctcgaactcctgacctcaggtgatccacccgcctcagcctcccaaagtgctgggattacaggcaggagccaccacgcccagcctaaacatttttatcttaccaagaattcctcaaagacccttggtgctgccacaatgcaaatgaaatggtcacatttataagaagggagtttatatttacaaggactgttatcacatttatcatttatgacctgctttaaagataagacatttagctgcatcatcaagagtctgtgataatgcgctgacacatcagaggttctgggagcctggaagccaaggggatcagagaaacactgagtgagccaacacagctagcatcctgaactcaccaacccatggtagccagggccacagcatgactgagaagtcatggccactggggaaggtgaatcctcagtcactgcaacaaggactttgcatgccaccaagacactttcaattcccaagtcaaggaccactggaccacagcgctttagggtctccaatgcccttcattttattttattttattttattttatttatttatttatgttttttttttggagacaaagttttgctcttgtcatccaggttggagtgcaatggcacaacttcggctcactgcaacctccacctcccaggttcaagcaattctcctgcctc[134 bp omitted]cggcctcccagagtggtgggattacaggcatgagccaccgcatccggcctccaatgccctttatagctcttgcttcctgtaagtgcaagagccagcaacacagaagcaccacctcctccagctcaccttggatagtcagaggtgacccctgtcagacacccagcttcctgtgccccaaggctctagaatactcctgcctctgctgcttattaccagagcaaatgtaggaagctctaaaggaagaataccagtgtgagtgctgccatatgccaaacactgtgctctctagttaaacaaagaaaaatcccctacagctctctgtgggggacttgagcctaaggaagtcttctcagtcccaaggtagagaagtcacaaatggcagatcgtcctaaagctcttccagatccctagcaagtgtagatgccacaaacacctatgcagcagcccaggacccagtgagccaagaaaggaaaggcaggccaggcctcctctggcctggggctgcactggggatagtgacagcagccctctggcccccacttgccttcaagagtccaaagggatctaaggaaccgacaacacccagatcatagccttggacaattctgccccaagacctccttaagagtcgtctttcacacttaacactctctactaaagcacctcaaccccatttccccaagaacaagctggagctcttaaaggcctggatctcacacccagctgaaacaccagaatatccacctccacccaaatccctttatttacctctaattcaatagaccagtgggcctagtccagtgcccagggccttcccaccacacagacagcaaaatgagcccctggaaaagggccacctcatctgcccccatcctctagctagctgtagggagctgggatctgtccagacactccaggtctccatggccacaagcccaaagttgcatagggaggtcatgagaaaagaccttagaagcagtctgctctttgaaccctgggattattcactgaccagccaaaaaggtgacaactgttctgatggcccaggtcagaccagtaactctagggcagaggtctcaatggaggtcctggttccaagggggtatattaaccgtctggtgttgaatacaggtgtctccctacacacatgcattttggaaggagaggagttagagctttcaccagattctcaaaggggcccatgactccaacctctggccctagttggcctggcccaggagctggggatacagccctagtcatatcaacatccctgggccatcctcgctgtccagggtctctcttctattcaaggatgtgcccaggtcggtagcagtatcctgtttcccttgtcctggcccttccagctgcagaaagtggacagcgggtttcacacccagccctgctgcacacgctccagcttcctggagacccgagccaggtttctcccagcagcacctctccatcccagagatggcaccatattcaaactgaggtaccagtggcactgacccccaacaacagagaggacccagcttcacacttgatccagcaggggcccaaccacatggtgagatgacttcctccgtgagagaattcctggggtccctcacctccttcaggcacagctggctataaagaaaaggggtgaaaggcccagtacatctccctgagtcctttctcctgggccaggtggctcaggtgctgcgggatcacccagggaaggctcattcctctcgctacaagacgctgactgcggatcaggtggggagcacggtggatggtcttcttgtatcctctatcgcctccagggcatcttgtttctaaactcccagggagtcccctcatcttctactccactactccaccaaaaaaaggaaaatctaaaccctccctccccttaaaacacattccgtctcaggaatttaatttcagtgtacgtttcttagagctaaaactttttttaaggggaaaagaaatgggcagggcagtgctgggtgtaaggcgaccacgcgaccgagaaaaggaagagggaggaatgaataaacgctgacaccagccccccttggagctcagagcctggggcacaggagccggcggggcgggcgagcaggggcggggacagcgcattcccaactttccctggccgagctgacgggagatacagctcccaggggaccgggagggaccaaaaaaggctgagccgacctgtgacatcggcggggggcaggaagcgaagctcccctccccctgaaaggcgctcggctcccagcaggcgcccccgcctgccgtcgccgcccagcctgcgcccccaggcccgggcactgcggggaggggcgcccacacaaaagggggagcggcgggagaggggactcgggcgaagccggctccgggaggcctcgtctcccttccctgcggcgctggcccgcgccccccggtctaatcgcgcgccccgctcccggccccccagatgcccgcacgccccccgcgcccggggcccgggatgaggtgggggctcgggaaggaagggcgggcggggacctgccgcacgcggagctcccggggagccgcgccgacagccccgggaatcaaactcgcgacggcccggccctcccggcggcgcctgggcaacgggtcccgagaaggtggggccgctgggccggggccgcggccgggattgcgcgcggggcgccggcgaggaccgcgcccggggccgggcgggagccgcgggagcgcgggggtcttaccgggcagcgccacgcgcgtccgctccgcgcgggccgcaggggccgggccgcgggccgggcgggggaggggctgcaatccgcagcggtggcggcggggccaggctcggcggcggcggcgcggctggggcgcggggaggcggagaaagtgaggcgaggccggcttcctagcggcgggcggcgagaaatgcagctgtccctgcgcggctgccggcagggccacaagtggggccgcgcggggaggagcggggctgcgggcggggcggggcgggggcccggctgcggcgcccccgggccctttccctatggccgacccctttccagagaggagggaagcggacctgggggtccggaaacctacatggttgccgggggtggagaggggagcacccagtgaaggctggaaaaatgccctccgtgtacctccctccccggccgcagtgactccctagcttgcgggcaggagggcgtgagcggggtgcctcgacctcccgcgcagagcggggtgcggggcatcctgcccctcccagctgcggagagggtgggcggaggagacctgagacctccgagactccgcggggagctaagagcagggctgcccgacaggttccaggtcagtgccaggaacccagggtgaggacgcacagctggggcttgggacacaggtgtggaggaggggcacctccctggaattagggccccggaaaggaaaccaaatcaaatgctgaggacacaggagatggtgggaagggggagcaaatcaaagctatcactcgtccacaccgacagataccacctgccatctcccattttctcctcccccaacctccccagcatccctgatcacttcaagggctgctgagccctgggaagattttccacggaagaacttgtttaataaatgggaaactgacctttgctatacttttcccacgtgctttcatttcagactccaatttgggagtaggtagcctaggtcaggtggtgaccaccaagcaccctgctacctaggggatctgaggagggtgaagaaggccagatgcaaactaagctctgtccccaaacaacttgcaaagggtctgcaccctcctcctggaaaagtctgccttacagacccatttgcccatctgggcccagaaccccaggaatagcccccctctcccctcctctgagcgcttgcaatttgctagccttgctgagacagatcgacacgctcagcctcagagacagctgatggtaaaaaccacaaaccaaagtgccccagacaccaatgtgtttccatcatttgcatgtcaagggcaagtttcttcagcaaggtgggaaactgggagggggagaaacctcagaaccacaccctcctcggggaggcccaacgttaggttagcatgttgaacggaactccaggactgggtttccaaacccctctgaggatctcctctctcctgctcctctctccccacacttcactccctggtgcattcaatttccgggggaggcagggtgcttgaaatcccagaagatggtcttcaggccccaggttaaagattcttaatccgaagggacagacccatgcctctatactgactcctggctcctttcccaggttgtaactgagagctcaggatttgtccgcctggccaatatagtctagattatgttatcaagtgtattaccttacacttacccatagtgcagttcatttgtcactttcctgcttacttgcaagatccctctgcagttcattcctgtcaccttggcatttcaggagcagaaaaatgcatctgcaaacctggagatttccatttgcactcgcctatggattgctcataatttttttttttttgagacggagtttcgctctgtcacccaggctggagtgcagtggcacgatctcaactcactgcaacctccgcctcccaggttcaagcaattctcctgcctacgcctcctgagtagctggggttacaggtgggtgccaccacgcccggctagtaaaatttttaaatacattattattatagtcattaataaaaccagttgctctaatggacactcttccttgaagcacacttttcttgggctttgctaacatactcctccttttgggtctgtccttctggaagctttttctcagaccccttccctgcctctcacaacttccccacccccagacacctccacccactcccaccactgcctctgagcccccagggctccagcccctcacaccagccgcctacagagggccacctgtgagtctcccagacacctaaaactcaaggaggctaaaggcgactgagaccgcttccctacctaagccacctcctcctactctcctgaatccacctctggctcagaggctggaagcctctgtctcctgtgcagcttccctggccctccactggttatcagatcctgttcatttctccttctctcaccgcctcactcctccacttctgcctggttcaggccctattgtctctgctcttccagagatgtcccttttgctttccagcccaacctcctatgtgcttcaggaaactctgttagttcttctttctcctcccctctgcttcaaaactacaaacacttcaggatacccccttctaagggaacctggccccaaccctgccctgccctcaagtcattgccctgtttctctcttctgcattcatcagtaggcctcccctaagaagcaaccagacccactctctgcttcttcaagccctattcaatcctcaacttcctacaatctgactttcttccccttcatcctaggggaaggtgatttttacagggaggcaccggcatctttctaggggaagatgcctttccaagggaggcaaccttaggctcctcattgtttcaacccatgggcctcctccctatcccattccttcactccattggagccctggatgttgctaacgcctccttgaaaccattcccaccctcatggcttcctagcctctgcgtctttctatccattccctcatttcttcagctctgcctgccccaggggtttctccaaggctgagtcctctaactttctaaccaacccctctttccagatgttctcacagggggaatagagtggggcaggtaccaacccctcatggctccacttgcagactgcatatatatatatatatatatatatatatatatatatttttttttttttttttttttttaagacagagtctcgctcttgttgtacagcttggagtacagtggcgcgatctcggctcacggcaacctctgcctcccaggttcaagcgattcttccaactcagcctcccgagtagctagaactacaggtgcacgccaccatgcccagctaatttttttatttttagtagaaatgaggttttaccatgttggccaggctggtctcaaactcccgacctccgcccgccatggcctaccaaagtgctggaattacaggcatgagccaccgcacccggctattttttttttttttttttttggttgttgtctgtttgttttgttttgttttgtttttgagacgtagtttcgctcttgttgcccaggctggagtgcaatggcatgatcttggctcactgcaacctccacctcccagattcaagcgattctcctgcctcagcctcccgagtagctgggattacaggcatgcaccaccacgcccagctaattttgtatttttcgtagagacggggtttctccatgttggtcaggctggtctcaaactcccaacctcaggtgatctgcccacctcagcctcccaaagtgctgggattacaggcgtggaccaccgtgcccagccaagttttattaataacattaccccctctgcacctagtggagtgtgctgatgacctgtccgagcaccccactccctctctcaagcccctgactggcatgtgttactgccattggacaagctgtcccacagccactgcaccttcagtgcggggagcctggagcccatcatctccacatcctttgcaagaattctctgtcctggataagcagcacctcccattcgctcaagctgcagatgttacatgctgccttcctcccctcgtacattcaaccccctcagtaaactcagggctttctgcttctgagtttctctggaacctgccccctctcctctgccctggctcaggccctgctgccagggccctgcctttcaatccatccttttcagtgccagcagttacttttctaatgtacaaaccggtgatgtctctgcactgctgaacaaggtggatgacttcccattgcttggagaatgaaatttaaactcctgagagaggcccttcccaggctgcccttaacttccattccagctcttcccattttctgtcctcatgccacccacccactcccgggctagaaccagccaagaacagggcagtcaccatggctcacatctgtagtcccagcactttgggaggccgaggcgggtgaatcacttgaggccaggagttcgagaccagcctggccaacatggtaaaaccctatttctactaaaaatacaaaaattagccaggcgtggtggcaggcgcctgtggtcccagctacctgggaggctgaggcaggaaaattgcttgaacctgggaggtggaggttgcagtgagccaagatcgtgcttgactccagcctgggtgacagagcgagactcaatctcaaacaaacaaacaaaaccagccaagaacacttgctgtttccacagactgaatgtgaaggtgatggaagccttttgctaagtctgtggctgtatgaagctcagatcgctggagcatatggcattatctactgtgagaatgaggctgatggagagccactgggctcaggcttggaaatggtgagctctgatcggaccgtggggaaaacaggacatttcccttctgaaggtcccccagcccagggcaaatgccagggcatgaatggttgataaggagagcagacagttgcggctctgcgaccaaccacattgtccctgccaccgtgagacccactcctcctcctaggactaccaaagacagcttaagaaggctggaggtagaaaagcaagtggtgtaaacttccaaataatttggataatcctgaccctttctcctctgaccaatttaatcaaggaactcagaggaaacttgccacctcgaactcctgggctcaagagattctcatgtctcagtttcctgagtagctggggctacaagcttgtaccaccgcacccagctatttaaagaaaaaaacttttttgtaaaggtgaggttttgccatcttgcccaggccggtctcgagctcctgggctcaagccatcctttcgcctcagcctcccaaagtgctgggattacaggcatgagccactgcacccagcccagcctaggaaacttttaaggaactggtaacatcacttggggatttgaaagaacacacaggtgaaccgtggaagcagtcacaataaataaataaataaataagcaaacaactcccttgtgagataatagctggatggatgcctgtgggcttgccgatttgatggctatctgaaaggattcccggggactttcaccccttccccagggtgccagcacgaacatcatgtctgtgagcccttcttcccttgcataagggattgctcccttgcagtccctgtgtccatcccaccagcctgtatagagagagagtgcgtgccattatagtttgtctcttcatgaactcccgggaggtaaggggtgttttccatctatctcagtgtctgcaccccgcgagattgagtaaatatttgccaaaggcctgaattgtaacaagtgagtgagacatgccctgtttgcctttataaaaaccactatcttccccttgattggtaacagtttgtgaggctccagggatcttgcccccttgtacagaggctgccagcttgtcctctacaaggccgtggggtggagatttgacctagataa[142 bp omitted]taaaaacacaaaaattagctaggcgtggtgatgcacacctgtagtcctagctacttgggaggctgaggcaggagaactgcttgaatccaggaggcagaggtttcagtgagccgagatcgcgccactgcactccagcctgggtgacagagcgagactctgtctccaaaaaagaagaaagaaaaaagaaaggaacagttagtgaatgtaaaaaatgttcatgatacaatgttgggggaaaggaatgctacaaaacaaaatgcaatgaccccatttattcttatatggtaaaaataaaatatttttttgtaaaaataaaaatataaacataaaagaaaaaacttgaagaaaatatatcaaaatgttagcatcattagatgagggtttaaagataacttttattttgttattagtatttttctggattttctgaatttcctacattatacatacattgctttattatcgattatgtatatatgtctatatttagccttcaaaatcattataattggaaggaggaaagttaaacataaatgactttcctccatgattattcttaacttaagctatttctttttttttttttttttttagatggagtctcactctgtcacccaggctgcagtgcagtggcacaatcttggctcactgcaacctctgcctcctgttgcccaggctggcctcaaattcctgggctcaagtgatccccccgcctcagcctcccaagtagctgggactacaggtgtgcaccagcatcgccttgacttgttcctcatcactctaatactcaatgaatgatgcctgtttttcttattgtcgttcttgcaattccaagaagggatacctgagatcaatttggcctagattctcagatctggttcttcccagaaatgaagctccctagaggaggttgtggggtggagcaggatgaatattcctgtgtgggacttggggagcaggtgctgcaggtggaggagccgcatggccctggtgtcctggggaaggatcctcccttcttggagggagggaacctctgctgggccagcaaatggtcagggaaggaggagagaggaagctggcactaaatcattgacccctgaacaggcttctgggcactagctgaaatgtcaaaaatgttttactctttggaggaagagcctcactcgggttgcacagcatagtagtgggtggaggaccctatagagggctgactgatgtcttcagagtagcttgcttcttaaaaagagaaaagagaaacctcctcctggaagcagggctgagcctctggggcaagtggaccctgaagctatggcaggactgagttcctaggagccagaccctcagcctcaggcctcacactccagtctatagagcctgctccctttagggtagggaaggtaaagcccagggctcagttcggctccattctacagtcaggaaagtgtcacattatcgtggcaggttgagaagcacagcaggagatggtagcatagaggggcacatctcccactgaggcacaagaaggctgaactgagatttaagggagccggaggaggtagtcacccatttctttatgaattcatggattactatcttccttcgattgtgtataatttgttattatcatctattttggcttagattgtttcggacttggccatgtgccaactcctggaattctgcggctgcatcctcatcttctttgagcacttccttactttcttgtgcaaagagacatttcaaccatcttggtaaagatttaattagatcatcaatgaatgctaaatctaagatgaaattttgttgaagagtaggatatatagatggtcttcaaatgtctccccacagactacttattagttgcaagggcaggggaaagtaattatgtgatagagaaaatgggtaacaccttgcccagtgatcaaagttaacatcatgtatgaaggacagagggacattgtgcgtctccgggtgtgatatcctgaggacacgtggcct[131 bp omitted]gcaacatctgcctcctaggttcaagtgattcccctgcctcagcctcctgagtagctgggactacaggcacatgccaccacacccagctaatttgtgtagttttagtagagacggggtttcaccatgttggccaggatagtctcgatctcttgaccttttgatcggcccacctcggcctcccaaagtgctgggattataggcgtgagccaccatgcctggccagaacttcatcttaatcatgaggaaaagccagacaaatacaaaatggagaatgttccattaaaaaaaaaataaggcggggtctgtattttttttaatgccagttatgtacatgttccagatttatggaggctagagagacatgacaactcaagactgagcagtctagaaggatttgaacttctcttcctcatcctactgggtaggtggtagtgccccttttcttcttacgaaggaaagaggaggtcaggcctgtgccaggcttgcagctagagaagaatgaactctttgattattgggatgatgagattataaggggaagctgtacagatgccttctctggatgtagtgaatatggggaatgaaggagatggaataacctgaccctagactagatctt[218 bp omitted]gaggcaagagaatagcttgaacccaggaggcggaggttgcagtgagctgaggtcgtgccactgcaatccagcctgggtgacagagcgagaccaaaaaaaaaaaaaaaaaaaaagaacataactacatcacctaactaacaactggaataaggataaggatggtagattaaatataagtattatataaatgtaagtgtataaagttaataactgtgctgtggtgtaacagcatatctctatttttaggaaatacacacagaaatatttaggggtaagagctatgatgtatgaaaccctagaatggttcagaaaaaaaaacaaattggatagagccccatatggtgattaagcaagggataaaatgttaataataggtgaatttgggtaaagggtttacagatatttcttggactattttcacttttgcaactttttgtaagtttgtaattgtttccaaatatatattgaatgttccaggctcactttgtgttttccctgcccaagctctgcaatcggctttttctgcaggagtcctagtgagcaggaaatttagccacattttaaaagtaggtgaatgagaagaaggctttcctagtatatggaacagcatgattaaagacaaagaaatatgaaatacaagtgtaaatggtagaaaggactgccggcgaaagtgggtgaaa[145 bp omitted]aaccccgtcctactaaaaatgcaaaaattagctgggtgtggtggcgggcgcctgtagtcccagctactcgggaggctgaagcaggagaatcgcttgaacccgggaggcggaggttgcagtcagccgagatcacgccactgcactccagcctggtgacggagcaagactccgtctaaaaaacaaaacaaaacaaaccgtggcctcacctgggtatgcaaaacgcagcccccacagttcccataagcctggtcccattgactcgtacagctgtgatttggatatgcgatacaataaacggacagattcagccatccctgaggggccaacactgcatttgggggcatgtcatctgcggaaaccatagaactgaattgtatctatttacatcaaatgagtacagctactgtgcagagtgcggaaagtgaagcagcattcgaggtccaaagctccagcaggagagaagcaatgctttctgtgaatgagatacaggccgccgccctcccaatcagaacacgggagatatcagccaatcccggcccgccgatgctctagtatcgggcgggggcccacacgcccaagagttgtttgtctgcctcgggtcccctccagccctaccgttggaggaaagaggcggagaggaggccaggaggccggcagggttgatcaggccaaatggtggggggcgccaaatgccaggccaatgtggagccagtttgggctccacagcagggtgactgatccagccatggcaacactcacatttaccttgtcccctgcggggctggttcctctcccggatcagtgagtccctgacgcctttgggaggggaggttggagctgtgagggctgactctggactgagcgggatagacggatttgggcttctctccctcatcccacctggctaggtggtggtgttcctcttcttcttaggaaggaaagaggaggtctggcctgtgctgagcttgcagctagagaaggacgaacgaactctttgattgtcaggacggtgagattgcgcggggaagctgtacagttgccttctctggatatagtgaatgtggagaacgaaggagatggaatgacctctctgaagcaggatgcaccatccccagataggcacatatcggatctcccagcctggtgactcttccgtggtctaatctgaacacctctggcctgccacacctctggccagcctccagttagctgcttttcaggagatgtgccatacgtctcattttctcattcctcggatgaagctcgttccccatgctggatgccaacccccaaaatctgaggtgagaaagcaatgcaggaaggcaattcagctcctttgcaggtctgtcagaggatgcaattggtgcctttgagcaaagtgatgctgccatgacccaaactggaaataggaggaccagatagagatggtctacattgaattcgaggctccatcctctgtaccaggccctgggctaagcactttacatgcttcagattaaaactttactaggagcaggtgcagtggcttatatctgtaatcccagcactttgggaggccgaggtgggtggatcacctgaggtcaggagttcaagaccaggatgaccaacatggtgaaattctgtctctaccaaaaatacaaaaatcagccggacgtggtggcacgtgcctgtaattccagctactctggaggctgaggcaggagaatcatttgaacccaggagtcggaggttgcagtgagccaagattgcaccatcacactacagcctgggcaacaagagcaaaactccgtctcaaaacaaaacaaaacgaaactttaccaggttggatttattgtcatgcttattttacagcttaggaaacagagggcagagaggctacatatcttgctgaaggttacatagcttcaagtggcacagcttggatttgtacccaggcctctcagattccaagtctctgctcttgatcataaccctaaactacagcacctcccagctgttccttatgccaaatcgccctctgctctggatcccctgcgggccctcctcacttaccttggtgcttactcctgtttctggccttggtacttggttccttgttgtgtttcaggtctcccggacattgggattcatcaatacagggcaaaatcagcaacaatcacaggctgccatgaacccactaatttggaatcaaagatttaggaatgtagcaaaacttttggaagctatggtccaatttggaaactagcctcccttctgggggtgctaaactgcctccacctttattttgatatctcccacctattcctgttataccaaggaagaataaactaactgcctgacgttagttcaggcaggggaaggtttcagaggaagcaacatttaaattacactttctgcctgtctaggggttcacagtggagaaagaatgttggagggctggttatggggagggcattctaggcctagaaaacagcggaagcagtgactctgtctcctttctctctctcttcgcagactcccccctccccattcttctccctcagaggtgcctgatagccacagagtctctggtgttgacaaagtgacagaacttcccttacgttgacagggccaccctggaatcaggacctactcttttgggacagagctctgggatttcaggaaagggtgggaccccacttcttccagcaagaagtggttcacaggtcctcactcctaattacttgaatcttgcctgtttcttcagctactgatttttctccttttttttttcttttaagaccgagtctcactctgttgcccaggctggagtacagtggtgcaattttggctcaccacaacctctgcctcccaggttcaagtgattctcctgcctcagcctcccgagtagctgggattacaggcatgcgccaccatgcccagctaatttttgtatttttagtagagatggggtttcactatgttggccaggctggtctcgaactcctgacctcgtgatccgcctgccttgggctcccaaattgctgggattacaggcgtgagccatcgcacccagccttttctcctttatctggtgaagaaatgcacgtcttctttcctgcctattggctgaaacaaatcatcacagctggctcggactagcagcctgtctccaagttccctaagtaatcatgtctagcccagggcaggtgcatggagagggtggtcagggtgggagtgatgtcacaggtagcacaagaacatttcctccaaaatgtctcttttcccttccttagcctcttcctaacctccaagactcccctttttcttcctccatatacatgcaaatctgatttctctctagctcttttcctgccactaacaaagataagaattccttggctcatgggcaagggccttggggatccaagctccttcaaaacagatctgtctggctgactctgtagggataataagcctctggcagtccccagttgtccctaagattggcaaagacctggcttcccatcccagtctttgaggatggctctcttctccatgggcagcctctagaattggtgcatctgtcccagcctagcctgagcactgactgccagagagagctgctggaccagtcattggaagggcatattgctccctgtcattccccttgatctcctcatcctctcagctgtcatgccaaaagaatacctcactggcagaacagaatattttcctcaaacgtccttctttagtttctgacacagccagatgcaggtggacctcactttaaggaaactccattaatgagagttctccctacatggttagcagttacatatattacaaaggagtcgtgattttaagttcttattttatgttttatgtaatcttgaaagagatatttaggggttgggagggaggtgggatgtcaatttaagataattagagatgaagaggacttctaaaattatgatgcaagtcagtagtgatagagaatctttttttgctttgttttgtttttttggagacggagtctggctctgtcgcccaggtgacagacagaggctgagacataaggattgcttgaacctgggaggcagaggttgcagtgagctgagattgtgccactgcactccagcc[149 bp omitted]tctactaaaaatacaaaattagctgggcatggtggcgcatgcctgtaatcccagctacttgggagcctgacgcaggagaatcacttgaactcaggacgcaggagaatcacttgaactcaggaggcggaggttctggtgagccgagatggcgccattgcactacagcctgggcaacaagagtgaaacaccatatcaaaaacaaacaaacaacaacaacaacaacaaaaactaacagagcagttttttgttcatttgtttgttttaagacagcgtcttgctctgtcgcctaggctggagtgcagtggcacaatctcagctcactgcaacctctgcctcccaggttcaagcaatccttatgtctcagcctcctgagtagctgggactacaggcttgcaccaccacgcctagctaaattttgtatttttagtagacacggggttttgccatgttggccaggctggtcttgaactcctggcctcaagcgatccagggcggtttttgtaaagtgatgtgtacttgaccttcatggtccagggccaagatctgggttaagtgcctatcttgggaagaggaaggctaactagccaacccctaatgggtaggtctaaggagagggctacctcatgcaaagatccaaaggaaagcctgcgacccttcattcctttatcggtactacatgggccttagattgctcaaaggtgggcagccaagagaagctggaatctggactaacacacaaactcagtcagtattctgccctggatcattacacactaacctgccagccccctaatttttttttttttttttgagacagagtcttgctgacacccaggctggagtgcagtggcgcgatctcggctgactgcaacctccgcctcccgggttcacgccattctcctgcctcagcctcctgagtagctgtgactacaggctcccgtcactacgccaagctaattttttgtatttttagttaagagacagggtttcaccgtg[136 bp omitted]ccaatgtcaggccagctgtgggggagatttacagacccaaaccagggacaaaagacattctttcaggatacaggactctttaaggaggaattggaaaaagtgcaagactgatggccagacctattagggcagggaggaaaaattgattactgtcccatgaacagattggacttttaggtccaatgatccttgaggatactgaagtgaaaacctccactatctcctctacatcctaaacctaggtcgattcagaggaccaaactacagggccccttgagaagagtggagacacctgaacagccgggactggaatgattaactagcaactcagtgaaataacacttcccttgttcctaggacaaacacagcacgaagaacactttcctccagctgtgttcactgagtcactaaaggcctaagacaattatcacaggaagtttggaaagcctcaattctatataaaacagatgtaggtatccaaaactttttcattgaatgaagtgtcacattcatcctgatttgctgtttggtgataccatcactcgtcccatctcccttaacagcctccttggaggcagcaaccatgtcttaaatcaacttttcatgccccttagtgcctaatagtgcgtggcacattgttggtcctcagtgggcatctcataaatctagttgaacacaaatgggcaagggacccagcttaaagcccctttcaactaaggaaattgggtcctagagcatgagaagaaatgttttaaacccatcttctcttttgggtaggacagggacctaaacctgtggccactgcctccatcctagcttcctgggccttacctgagctgcttgggagggtgcacctaccaagggcagtcagtctggtgcccttccaccctccaaccagcctgatactggtccctccctctctctccaacccaatactgagatgtgcgcacctgaaaagaaagtacttgaaaaattcctctattatcagagcaaactgatgaagcttctgaggtattaaacaatccatcataacatttgtgaccagttaactttaattttcaaaataaatctgcagtattttgcatgttagtaatacagtgctggtattgacaggtaaaatcatcatctgcttacatagaaaccttcattcaggagcacaccgtaggaggggaacggatacacaataaaaagcaaacgcaggccaagcagcgagccctagagcgtaacaggctggatgtcagatttaaggattatctaatacaactgtttagctgccaatctgataaaggggaagctctcaaccaggttacaaccagaagggaaaaacgtactctgccttttcgtagagcagtggctgtcgtgccttcaacacctggttgaatcagttcatcaacatcgaaactcaattccagttccaagacacagaatttcatcacacaacctattcggtaccccttttcagtggcccacccaaaaccccctcctgccatcgactctctccctcccaaaagaagacatgacgtggctttattattgcagacaagcttcttaagtgaataaagaatgcatacaaaatagtattttaactgaagtcatacaatgaagtctcactcctgtttattatacaatgaattgataaaacaattacttctagtatatatctttttttttttagaactaatactttcagggttctgacaaccacattctagcttaggggtagggcccacacctgcccccactgaggactgctccttggaccactgtggaggaagcctgggctgtctgaattgtgaattatgactgccagcccaccagagataacagatcccagcaggcagagccagaacccagttttgggtctgcatgccaggaaatgtgaacttcctccaaatgtggccactgtgcctcccaatccaggcctcagcaaggtcattcttgggctttccctacacgagtccttccagtagtccacacataatgctctacatattaaaaacaaaccatttttgtactgtggataagaacagttgtaacaaagtcatagctacatatttttctctacattttgtttattgagacaaactaattaaaaggcacaaacatagggcatgtttacatggacattataacaaacatatacattaaaagtgtaggaatgtgttgccttcctgctaaacagaaagttcctaagcttttatatatacaaaagttgtacaatttaatgtcctaaagtacaaaagatcatttataaaattattttacactaagtactatttattttatttttttactatgtagttcaaccccctagaactgttttgtataatgacacacagatacctgtccctgatgtaggaagtctgtctcagatgcaaggtattttgatgcttgaactgacacagtagggtataaatggaaatcatccagtttgatagtcagtcctgcaaacattctgcaagattaacacaactaatttccatttctcttaactgcaatgattaaaaaatgaaaaaaaccaaaaacatattgcaacttaaaaaatcacagcatcttggtttagttaattttttttttaacgcaatgctttaaaaacaatgcgtggcatgatggtgtaaagagtatctgtttccctagcttttggtttctactttatgtacagagataaaatatcttgctaagaaataaaaagcacatgtctcaacgtgcataatcattgctgggtttctacagggaatgcagacagctgtctccctgaaaacaccacaaagctgatacaagtgttttctcaaagaaaaaaaaagtgatgtccatatttacaaagttgaacaaatctgcgcaatacttaagaaacggaaggagaaatttaaaaaaagatacactctgcatgttctgaaggggcatacactacctagttagtggttagaataaaaactgtatacaatttaatataagacataaactctagtgagcaactaacacatctgtccctgttgtaatatcaacaggctctgattgggagagagaggggcatatcacatcccagtgcctccagcgtcttccaatttaaagcaatatatttgtactgttccaaagtactccttggctcctaaataggaatcccactggactctgtttattaggagcttgcctgtccacacacttgacttctcctctgtcagttgaggcttttcttagcaaaacacaatttgtagattttttttaaattttttttttttttaaaaagtcaactacaatgctatattccatcgggattaatatgctgagcaatatttacatctccaaatatcaggtcacaatccctattatacgttgaagttagaatgataaattatcatatgctttgcatatcagagctggtatcacctttcccatagggaatgctgcctgaaattaacatattcccaaaggtaaaatgcatattctctgaaatgcattttattatgacaatgcatgtatttactcataaaaacaataaacacagacaattctacactagctctcaatctgtggatttaaaatttcaggttaaaatcagccatccaccttgtatagggagaagagttctgctagtgtttacaataaagtgattccttgggattagaaatagtaatgctgtttttttattttgaagtgggttctacttatgattggttttaattctggcatttcatcttgccaactactatcctgtttaagcaatgttgtcagctaaaaggaatttctgattaaactaaagtggtccagtgataagttacatacacaccctactttgaataatcccagccaaattggagaaaaatgctaccacactcttattaactaatgtaataaaatctcccaatttcatggtttactttttgctttaatcaactaaaagttaagttgctggtaaatatttacttttacccatattttgattttataatactgtttaccaaggcggtgatgtaggcaaagcttggggcaagaaaggcatgctctctacaggtctcattgctatattgagaggggcggctaatgtcataggtgtgggtagattcattggagatgtgatggtgacagggtgtgctatattcactggggcagtgacgggggtggggaggttgactggggtagtgagtgttaaaggagaggtcatggataatggactggttatagttacaggatgccctatgttcattgggctggttatgttaactgcacttgaaacatttactggacttctcatgctcattgcagctgccactgtgactgggtttgacatagtcccagacgacacagaggatgttatactgaatggagtagtgagagtcacaggtgtcgtagcagccgtggaggtttggcacaggttagcagcttctaaaataagaagaaaaagggtctttagattctcaaaacagtgagcaaaattcacaaagtttctgaatcaatttcttttcattaaaaatgtcaaacatttaataaatcaaattccagttttctatcaagcggtcaacagaacagaggatctttctgagcacaagcctgggggccagggatcccagtgtatgaatcaccttctgatgctatacctcctgcaaggacttaagcaacttgtttagccttgcactttaggtttcaagttcagatttacttacctacctcacagtgatgctgagaggatcagttaacttctgcaatgcagggctaagtgttctcactactacttcatgcagttcctctgagttctaaaaactttcttgggaagagccaacctccagcaggccaggctaaagagcttgtttacacagagctgggccaatggttacacaataacagataatcagaaaaatcttctcgtaaggcacactgtaactagcagagagaggtgtgcatactcaataagtatgttaaagcctgagacatgaagccacattctgtgaaggttttaaaaatgcataattggggaatgataaacaagctattttagtatcatgtttgtttcagttttagaaatatgtttcagttaaataatcttattctttctggttatgtttcttaactacattaggaaagaaaaaaatactcctcaataagttcatgttctcctcactcccatttcttcttgtttctgatgttgacacaatcacctattttatgcctagtatctttaactctacatattacacataccaccaagcataccaaagagaactagctaggcaaggagaccctgcagtgagttagaggaccctggtccttcttatccaacaaaacctggacacttttttttctgagacagggtctccttctgttgctcaggctggagtgcagtagcatgatcaaagcttactgcagcctcaaaccctcaaggctcaagcaatcctcccactttagtctaccaagtagctgggactacaggtgcatgccatcacgcccagctaatttttgtgttttttgtagagactgggtttcgccacgttgcccaggctggtctcctcctaggctcaagcgatccgtccacctcagcctcccaaagtgctgggattaaggtgtgagccaggtctagacacttcttaaaaaatacttcccctcaaggtgacatccccaacccacccctcaacaaaattcagcaccagaaaacagcagtaaaatgatgggtaggctagctgtgacttggctatcaaaatggagaaatatacttgaactaaagatagagatctgtatatgatccacaaaggtcttatcaccgcagggggacccttgagtcaagcagcccttacttgatcaatacaatgtaactttggcacacaccattctccctatcagggattcccaaatctggctgattatcaaaatcaactatctagaggacttcaaaacaaacaaacaaacaaacaaaaaaaacccaacaaaacaaaaacaaaggactccaggagaatcaatagtgaaatttagatggaacttgggaaatgtgtatttttaaaaagcttcccagacaatatgattgtcgatcaggtttgaaaacttatgttaccttatttaggcctaatatttaaaggacgttatagattcaagcttagattttcaggtcaggagtctcctctcctctaaaatgtgacatttactaacatgaatacagaggtttctaagatcagtggtctttttgagagagattcacgctacaaatgggaatacaataacattttgtttcatggaagtcagaagatgagctaaacaaccaagtcttattgtgcaagcaaattgaaatacaataccaaatagaggagtacaccgagagagattgagagagaaaaccaattcactttaaggtgctgggagtattgctgaggatattctccacctgctttcaccaaagaatttttactctcttatctgctgacccccttacctcctcctccgtgttttctttttaatctaagagtgtccttttactatgacttaaacatttttactccttctctaagtaaaatacccttcataatatactttcaacccactatacaattatcacagcactacactttttcctccccattgcccgtcccctctccccattctaacacaaaagttcatttgttttgttttttttgagatgggggtctcaatctgttgtccaggctggagtgcagtgatgcaattgtagctcactgcagcctcaaactcctgggttcaagtgaccctcccaccttagcttcctgagtagcggggactacagacacgcactgtcacgtccggctaattttttgttgttgttgttgtttttgtagagatggggtcttgccatcttgcccaggctggtctcaaactcctggcctcaagtgatcctcccaccttggcctcctgaagtgctggaattataggtgtgagccatcacacctggccaaaacattttattaaaataatgacaaatcttcagatggaagctaggaacaagcagcacctgaggaatgatgaaaagcctatacggactgctgcattcttttcttccaatgccagtaaatgtatgaaaaagaatgtcgccagggcccagtagctcacgcctataatcccagtactttgggagggtgaggcgggcagatcacctgaggtcgggaattcgagaccagcctgaccaacatggagaaaccctgtctctactaaaaatacaaaattagctgggcgcggtggcacatgcctgtaatcccagctactcaggaggctgaggcaggagaatcgcttgaacctgggaggcggaggttgtggtgagacaagatcatgccattgcactccagcctgggcaacaagagcaaaactccatctcaaaaaaagaaaaaaaaaaaaaaagaatgctattccttttatttttatccaagtataggaggtttagagatcactctggccaggtgtggtgactcatgcctgtaatcccagaactttaggagtctgaggcgggtggatcacttgagatcaggagttcaagactagcctggccaacatggcaaaaccctgtctctagtaaaaatacaaaaattagtcgggtgtggtggcacacacctgtcgtcctggctacccgggaggctgaggcacaagaatcacttgaacccaggaggcggaggctgcagtgagccgagatcacgccactgcactcaagcctgagcaacagagcgagagactctgtctaaaaaagaaaaaaaaaaaacagaagggatcactctgaggaagggaagagccacactacatgaaagcaaaagatggaagaaactacacagaaaaggaattacatacagaggagcccacagatagaggattccttaacatttaacatagtaagacattgtagaggtggaggaggaagaaggaatttacaaatctgtcctttggctcatgatacattgacaaaatgattcatttgaaatggctgcacaatagtccagaagccaaagctgtactagtaagttgaaaagtacgttgaaaactgatactccaactgattcgttagaaaatatacacgagagaaaagcaaaccatttaaaattttttaaacaattacagtaaagtcctcagcagcagaagactagatatgttaaggccagccagtgatagactgaaggagattaagggtgtgaccaagagaaaagacatcaacactacagaatctgaaacatgtaataaataatacaatgaaaaagaacactacagagcaaaaatagcacagttgtaagaaaatgaacttatgtacacacaaggatatccacctctaaaagtgggaatattttagaaaggaaaaaaaaagcccataatgcatggaggttgacatcaaattgaatataaaaatgcaactctgagcatagcaaaggaccaaatttggatccaggtttgtagcaaaaagtacatcaaaagaaagaacatgataggaagtactgagaacttttaattcctagtaataacttatctggacactttattgccaataactatactttaccagatatttcccagcatgcactatttccatgtttccattaagctagatttcctaaaactgtggcttctctactttgatcacttggcatactaaatgaaaacacttctctagccatattttcaacactggaagctgtgccttacctttcttccttgctttaacagcttcttcccacagtctcagtgtttctacttgcttccctggccagcttgtcacatgttgttgttgttgttgttgctgctgctgctgctgctgctgctgctgctgctgctgcttttggttactggtctcttcactcatgcatgctattacaaagacaaaccaaaaacactgtatctacctgtaaaactgttgccgttttttttcaaaattgacttctcatgcttctgtgatcttaaccatttaacctgatagctcttagtaagtgcatcttttttgctgctgtgtctatattggtcaaaataaacaagcactaaaaagtctagagaactagcaaaaatcaatataaaagagaaaaggactctttgctataaaaaaaaaaccatcaaaaaaaaaaaaagcaagtgtctttaaaaatggaagtttgatattattaatataggactaatcaacattcaacaaaattttttatttgatcacaataatgtacactaaaagtgaatgtttataggccgggtgcagtggctcatgcctgtaatcctagcactttgggaggccgaggcaggtggactgtctgggctcaggagttcgagaccagcctgggcaacacggtgaaacgccgtctctatgaaaatacaaaaaaagtagcaaaggtaatcgggcatggcagtgtgcacctgtaatcccagttacttgggaggctgaggcaggagaatcgcttgaacccaggaggcggaggttgcagtgagccgagatcgtgccattgcacttcagcctgggcaacagtgtgaagactccgtctcaaaaaaaaaaaaaaaaaaaaacaaaaaaaacagaagtgaatgcttataaagtacaacataccagtgtacttacaaagaagtgtacttacaaacccagtgtacttacaaagaagtaaaaatggatagattaacacacattaagctttcttccccattctcttgtggccacctatttttttgagaatttgatgtttctactgcataaagtacatatataatagaataaaggattaggaaaatgccttcttctagtggttagggcaatcttaaaagaaaaagcctgggtaaatgcaagtattctatcttcaactctgaatttaaggcaagcaaagcatttaaaccttcaagtggatatgatatctcatttctctacagatttgggtttgaaaagcaagcttattaatactgctttcaccttaaaggttattattagcttatcaatgctgtttgcatacatgaaagtaaagcatagttctgacattaatatactctgtccattgttgcctgtttgcacatgttggcaataggaggaaacacgtaaggtgaatattaatacctttgatacaatatgaaaacatgcatatttcacccatctgaaatataaaagaaagaaaatctgaagcaccacctacttttactgatgccttgtttacatgtattacagttgatactttggctctgcccatgagtctttaagtggctggtgatgtatgctgcactcaggagcttcccacagatgttacatgataccttgccttcatggcgcaccatgtgtgtccgcagtctgtctttggtggcaaaggcagcagtgcacgtctgcatgagggaggaaaactttttttaaatatagactatcctgttctactcattttgaagtacgttatattctgtgcattaccctatccacatcagcaagctgacaactagttgaattttaattgcatatgttacctagaatcataatcataataaaactcttgataaattttagactcttccattttgaaggaagaaaatacatcaacacagagtagcacaaaaaatgtaagctttagggtaagttaaacctgggtttaagttgagctccacaatttactaaatggtgtaatgttgaacaagttggttaacctatctgaaagcttcttcatctgtaaaatggggataacatctctcacaaaattactggtggattaagaaaagcctggtatacacagcaggcactcactcaatgacactagcttccttcctccaattagatctttcttagcattcaaatcatttacttaataaaatcagtcattaacaaacttaactgaaaggtgtactaaaagacttccagcaacaaactaaaattaccaatgcctaaaacagtcatttgatttagcaaaattcttaatgttttcgttattataattgatgtcaaataaaatcattaactggaatagatttttaaacaactagaaagtgttccaatttggtaataacaaacaaaaatctagtaagtggtaacatttgggagaaaaattcattattttctcctattacagttaaaacaacttcaataatcaacccagaaattaaagccctttattcttttattcatttcaaatacacaaccacctttgcaagactgtaacttttttttcctaacaaaaaatactattgcccaaagaaagggaaatatagcttaaaaaaaacaacacgcttaaatttttaaatgatcttgctttacagaaacagaagctgtcagttatattttataaaactagaagtcaaatgggccacatttactcaggtcagtgattttaagactattcaagaatggtgagattcaactggctcagaccttctggataatgtgcattaagtgctacactaaggataagtcattttaactcttacttggcatttgaagggtctttctgttgaatggacatgttttacatgacagcttaagtggtcaggcctgtgaaaaagagagtttcaacagaagatataatcgaacacatagagaaatgctacttatgtgatgctcacatgcttggcagattgggaaggggtgcattttagggaaagctagcagaattaccaacctccctcccccggtgcaagtctccttccctctcttaccatgaacaaagtcttaggcctctacctgttaattttctctcctagtcaacatcaaatcatattaggtcttgattctttacaattacaaaatacccgaagttttagtcttaacacttgccagaaacagctaccactatattaactctaaaagcttttataaatgaaaattagtgaaatgttggtgctctcagaaaaatgaaaaaacattctaaaagtttaattaagagtatccaaggtcatcccaacttccaagaaatgttactttaatttgcccagtgagcctcatgtctagtcccccaactgaactgaaaactggtggttttgcagtgataagtatccatgtgccaaatgaaagcctgagtccaccgaggcacttgttaagtgaaaaaaacaggttaatcactatgtcaccacttgtcaatcacaccaaactgaggttagacctggaggtgttaatacttatctatcaccaatctcctctaataacacaggtctgcccacatctgttctcacataaacattctagatcacatggagacaaaactgaagtacactgataccataatgaagcaaagcaaagcaaagcaaaatgcagtaccttgagaagcctttcccacaaacactgcaagtatagggtttggtgatgcctccttcatgagacctcacatggtaagtcatccggtccttcctcttgaagcgctgattacaaataggacactcaaagggtttctcatctgaatgggagagcttgtgtcgattgagatggtacacatctcggaaggccttcccacacatctcacaagcatggttcttcttgacaggcttactgggtttcttgacagactgggtcactggcatagctgtggtgctggcactgctactggggttggtgcccgaggaagatgtagtgactgttgacaagatgcctgcaatggtcgagaccaacgaagttcggctgctgtccccagcgatggtagagataaggggaaccaccgtggtgggggttttctttggccgggacaccaacttgatccctgtgtggcaggattcgtggcgcctcaggtgatagctgtccctgaaagctttactgcagtaagtgcacacaaatgaagttttgggtttttcttttttaatcccaatggcatcctttaatgtttctggtgcaccctgaggtttctgagttattggtattggaagcaatggtttctgatcagggggctccacggcagagctcaggaggggcagcaagctgttctgtgctgcctgctgttggtgatgggaagcttcatgggcctaaaaccaaacatttacacttcagaaactcagcctctcacaatggccttcgaaattcaacatgctccagacaatagagaccagaagaaacagtcaaagaacctataagctactctgcagtggtaatccagcaaccacctagttactctaagagctcacaatacaaagcattgaaaaatcactgtgcagacacaaaacttttgcaactaagttgctgacagtgatcttgcttttaaacagctgactaaactacacactatcctggttcataagggacagaccagctgatgaaatcagtttgcattagtctgtcagcgctgaaaccaagtttaaataacttacttaaaaaaaccactccagatttaagtatttaatagtaccttactgcagcaatacacacatacacactcacatacatgcaataacacaatcatctatttgtctattatccagaagaaaagcatcatgtctttctatcagaaaactcagattgaggaaggggctgttgctaagtgatgaaagaaatctagttctctaaatacatttgctagtcgttaacgttaagttttcacttgactctactaaaaggtttggttgaaacaaaatctgctatgaagcaacctggaaggcatctgtgaaggcagcccatagcaaacacctgtcagttgtttctcaggtcatttaattgtatactgaagtctgcatctttcagcaacactatctgttcaaatcccaaactctcaaagacagactaatgagaaaaacaaactataaacacttaaattcctttcatattcatcttcttccagcagttgtaggtttcaataaagtattagacatttgctcttatgatgtgcttctccactcccaaaactggaggctgcacactggaaattcttttagccgcaatgaaaccaaaatttcaccatggatcaggttcttgacatttatgagtagttactctcttggttctgatactttcaaaattctccatactgataaacatttaggaaatgatggaaaaaattcctgaaatagttcttcctaatacgttgttctttaccaacattatttttgaaactcttgacagtgagcccaagcccctatgcttgagttttgtaatcctaataagatgcatgcactcaagaggagtttcaaatattttaagcatacaatgtcctactaggggcccatcccatcattttagacactttagacggttacttacccttcttactctataaccacaagtcccacagctaacttaaggacaaaaaaacaaagagaaacacacacacactcacagctcctcctctgatgggtaagaacatctaccacacattgcttctatgtttacttgatggcagcataacagttaagcctggaactagtctcccccaaacgattaggaggtgtggtatccagagttctcagtttcaatttaataattttgatgtaatcaccctttgagtcctggaagcattctcagaaattatgtggttacttatgagtctctttctggacttaactgctcctagcaaattacagtccgcttttaatctaatttgtgaagctcctgtaaatgtaagggtctatctacccaggtgacatcagcagaaactttacagaatttggactccagttgtaaccccttttccaacctggctgtaggatactcgtttccatacagtatacaaatagttaatagctgaagatagctgaagatatacaatttcaaaggctaacagatcagataatagggaatgcagatcttctggacaaagttcagacttatagcatttagaggcatttttcaactctaaacaaccattagtacgatggagtactaaaagcacttactgccattttaccaattcagatgtctgtggcaacataaagtatttttacagcattgctgaagctcactctcacaggagggtcacaccaggtccctgcttcttgggtgaaatgctgcagaaccactacaggaatcactctctgaggattcctaggatccccacacttctacaagaagccttctaagggggaactgggttttcccaacttcttctctgggggagagacagagtaaaataacaaccacggccagccttcagttaagtgatttattttaaaaatataacttctgggtaggcttttatttgactagcatcatcaaaccaaagttttaattttatatcccatctctttcaactgcaaggctttttaaccctgcccaagctttccttttcctggggctggcaagaaacaaaacagaaatgttatttcatcacccagggtagtaggatatggcaccatgaaatctccagtgccagagggtaaaagattttgtactgaacaaattaacatcggtgagtcacatcttgaatgtcctgttagaagaatcatccatcaaacattttaatagctatagctttcactttccaccaagttatctggaaagcaagcaggtattaaattgtttcaaaatataaattcaacaggatgctccaggaaacaaacaagataatttaactccatatccccagtgaaaattacttaaaaccagaactgattaagtctattcatacctttccatagaaaagactgaaatattctctttacccattcaactgctctcggctctaaattttaagttttccaacaaatttcactgcacacattgccaagcccaggattaaatatttgttttcacacttctccatcaggtggaaaaaaagattttaatagctgaaaaaaattaaataatataaaatctaattaaaaagttgatcaataaacgcttggcatttgttttacccaggagaaaaataatctttaaaaaagtatttcaaaagatttttcaaccagctttccaaagatgtgttatgggtttttcctttacatgaagaacacttttttttttcaatctctatagacaccatgcttaatatggtttttaatcacacgaaaatcacttcagtggcacatcaatcccatattttaaaataaccatttgagcttttttctggggaaagtatttgccacctttacaccaacctggatgcatgctagttatatatcatttcttttccaatgcattttcaagttggtttatcacattattagcaagctcatcaaagtacaataaaacaacactgatcagaatgagaaaagggggaagttcatgaattccataatgttgggtattttagattttaagaagcccaaatatatttccataactacttaaagatcaaattgcccacatttgaaaaaatatgtcttaaaacaacaggccagtctacacagtaggtaatttctgagttatccaattctctatattaactccactaggatgaatccagtggctgggagaataattttttgaaaattctgcatccgttcctgttagtttcaaaaggtatcaagcgccccagctacgcgtttgggatttcacgaagtattcaaaggaaaataactcagagaggcgggaagaacgcacttaaaagtgacgagcttcctaacctcctccagttccgaagtttccccgtgagctcatcgctactgcccactgaatgcttcgttttgcaaacagaaacgaagtaggaaaaaaataagttccagcctagatctgccaaacaggggtcccccatctaaagtgggcgggcaagagaattgccaaaacacatcggctacagtcactttcaagtttcttgcaaaaaagcgaagaccaacatcccagagagtgactcatctgggggctttgtaagcggactttgtttgctctctccacttggttggaggaaacgttcgaggtgggcgagaaagaaaagcgcttcgggagaaggtcgggcctccaggagtcccggcccccaccgctccccgcctgccccgggccggcccggctgggggattccccaggctgaatgggacggcgggagagctggacagagggagaaggtgtcagctgccaaggctcggctgagacttgggaaaaaaaaatgtaaatccagtgaaaaagtttggggaggggatacacactcacaacatccgcccccccaactgggtaaacacgagaggggtggtggcggtgagggggagtggcggggaacctggggatacccgctattcgcggggacacgggagggggtcagaaagtcaacacacgcacgcacacacacaaaaagacgaggaaggtgaaaagagaacaagcgaaagatggatgaagtggcggggaggagactcagggcaggacctggggacctcctcaccccaccgtgggggaccgggccggcacgcaatggcccagcagcccgcgctatccagcggcccggcgccctcctttctctgggccgcggggtggtgacagcgaccggcctcctcccttccccttcagagcgagagggaagggtgtgtgtgagtgtgtgtgtgtgcgtgtgtgtgctggggggcccccgggttcaccccgcggcctgctatctcccccgcaccccgtgaggccgcctcctttcacctcagcagccccgcttcgccggggcgggcgggcggaaaaacaaagggggattaaggccgggccggagagcggagccgggagggaggggaggaggagcgcccgcccgcccgccagcccggggcccggcccccctgtcccccccgtgcccccccgggggggcccccagtacctggaacaggaacgcggtccagttggcctccatggctgcggcggccgacccccctcctccccactccccccgctcggggagcctcctcagccggaggaggcgacaacaaagcggcggcggcggcggcggcaacggcagcggcggctcctcaacatggcagcgccgagcgcggccacttccggtaacctccgggacgcaccaccgcggcggcgagcgcgggcggggggggagccccggcccggccgccgccgcccccagtcgcccggaccccctctgggcgtccccgctgccggctcgccgcctcggagctcagccagtgcccgctggcggtggggtcagggcccccgcgggggggctggggtggggcccggggcggggatggggcgcggcgtccccccccgcgggggtgtgtggtgctgcggtccgtggctcaggcagctggagcagggggagctcaggagagaagatggaggacgccagggtctggcgctggcccgctgggcacagctgggccgtctcccgtgactcagacacggtgtccagcaccgtcgcgtccctgttagaccctcagcggagggcacaggccacggcggacactcggctcttcagtcgctcatgcacagcatggtccccacctccaaactgggggaagccctttcgacttcgagcctctcttccttttggcatttcctccccggccggctaagccctctgcgctctcgctatgatatgcatctcatggcgagatggccttccaactcaagcagggaatcccactggggtgcagcctcagatcctctcagtgtggagggaaacacttcccacgcgtagagatgtcattactgggttattcttgggtgaagggctgagcctccccatcctccccttcactccaagataggatgtgaaattctatcccaacacccctcctctcccgccaaaaataaaaacaagtgagatagtatagacaaattattttagtcctttagtacagtctgtttcctccttcacccccagaacaaaaatcgaacttctggttggacagcgtcagatgtcactgaggtgaccccagcctgtttgcagttccaagtcttccgtgtaggcgtcactgctactggaactttgtagatgaggagcctgtatgatgatgtcctgaacatttctatcctttcctcacacagagggaagctactgggaatatcagagacaagctattattaaacaagtgtctctagtccaagacatctcctgtggcagggaaatgagggggcaggctgtatcagtgatatttttataaactctggttttagaaaaaattcttcagatggacgcattattttaagactttaacattttccaaaaccaactgaatcttatcccctccatttatccccctccagacacttctaatcaaggtcaccatctccaacttcccccatagacaataaaaatatggctggagaattctactgtaatagaaaaccaaggagatatagtaatttgacagtgtgtttcctttccatccactagacaagaataccccctcccattctttcctcccctcagtcaccagaatgaaggggctggaaaacgttggtctggttccttttagagctgattccccattggatactgcctggaggccttggggatgaatgagaagttctgcagtttggatcagtagcagaagcaggtaacacatcagggaaccggtcagcctaagataggaggggacagaaaatgatgaaagagtttctgatacatttatcagctaaattgctatggtcacccccatgtctcctgtaatgtccaaacctaaggaattaactaagtaaactaaaacctttgtgttcttgctctgaccttggacaatggaattcttcttattttcattcagtggatagcaaatctgcttcttccctgccttaactcactcaaggtctctgtgatgcactccagagttttcctccttccctgcatagtcttctcctccctagctgcctttcaaattggtgaaaatgaagcttcaggattatgaaaactagtacttaatgaagaccattattctaatgacaatatcgctggactcttgaacttgttatgctgggatctagaaaccctttccccagcaatctttcacacagcacctctgggaagcggtttcccactaacaggaaatagaggtcaagtggaaacagtccagttctcattactgaaaagctaagattcagaagaatcacttttcttgaggaaaatggctaattctatttctatccataagacaaaatcagaattgattgctcctcaaacattctttaaaaaaaaattaaccttttaagttcatgtaaattttaaacactgagctattttccagaaggaaaatactcagaagtttgaaacaagtactcaaaaacaatcggttccaactgttagaggaatataatgaaaccagtatgatcaaatgctccatccttacctagaaggggctatttctacttttaggacagaaaatttctctaaccaaacaaaaaggagctctctccttaagtgagcttccacagactatatactggggtccagtcaaaagacagatgtccaaagacagcaaattcatctagattattgtaaacaattttcggtgagtgagtaaatggtattaccttcagccatgatgaataaagcatctaagccaaaaatacaatgtgcctacatctacccaaacaaaagtcagatccccaacttgccctgttcaggttcctctctcctcctcccacactccaagttgtataacctgtcacctaaccttttagggtctcagcttcctcatctggaaaattagaacaaaatatctacctcacaatggtcacctgtggatttaatgagaaatatgtgtaagatgcttagaacattttccagatatataacagatgtgaaataaatatttttattggtgttatcgagtggttctagattaactttggggcttggaactctgcacataagctctgagccagttaattatcccttttactttcgccaagtgacaggttttctcccatccatttctccttcaaagagccctaaggtaaacgggcaaagggctaatgacacataacaaaggaagatgcctattaaaatctgttgttctaaacacaacttttagtaaacattagaaagcaacaggatatttccttcctcatttggagagaattttaaagtcctgtgaatacattgaggatgtggattacagacttagaatcctaggaaaagaaagtatctctgccgttgtcaattacctgtccccagctaagactgctccacaaactaaaaacaaatccaaaactttcagtagggaatatctagttagaagcttcaaattggcaagttaatggaccaactctttatgcaaaaaagccagaactgacaattaacaaatttaatagtaaaaatcaagattgcaatatttagaaataccaaaaagtattggccagaaagaaataacccttccatatcagcctcaatacaatcaggagaaaaagcaacatattttcaaagtgacaccccccccatccccccttaaatactccaaactcctcagggaggaaagcagaggttatctcctcactgcctgaactggataagcacactaagggctttgaagccatttgccttttgcctttgacccatgtggtcagaagtcaggtttgtgtttcaattctaccacctgaagtgtcaccaggagttatttaactggcaaggtgaggaaagggaaacaagaattctttttcctgaatacccatttaagttccttgacaactggaacaaagtcatagagagcaaagggacaatgtaacaaatctacccattttcctagtagacactgaattcagctggtagtcgagggcttttaattaaaacattttattgtttctaagaatgttcacacaatccaagacttcaaaaatgagtctaaagccatggaaacacatttatcaccttcatgcttgttgaaggacaccagcaaaaatcaatgctaaacctatcagcttcatccattaaagcatttgcatagagaaactaacttccattttacaactctttaatgacagggagaatatccaacaaatcgcaagtaaaatagcatagaccacaaggaaagaaactaagacaagtcaaaaatacaccaagtaagaaattcaatacaactggaaaacatactcataggcaccaacattcctcctttggacacctgttccttactgccctcagatgccccaggacagggtaatggctgagcatggaaaaagtaggtaatgggtcacacaaacttggtggtcctgcaccaaactacaaagattagctcaattatagcattgtgctaacagtaaaagtagtaaaaaataaaaaattaaaaaaaataaaaaaataaactaaattcctacacaaagtttctcgagtacagaggtgaatgtcttctcctcggctacagcctccaccccaaatacaacccaccagttaagagggataacactaaacaatgctgtttagtgtcatgtgcacccatctacatgaccagaaaaatactgttcatatgcaaaaaaatttactaattgttaatgcctggccagatgttcttgtgaagagcaaggcaggggaaaaacatgttatcaagtgaatactctatccaaactccaagagaaacatctccagtttttcttcagagtcaatttgatcttcaactgagggtccctccattcttggcagtgagaggaacagtgaataatgaaaacaggtgttcagaaacctatgcagtatactccctgggtaaggaaggtgagcagcagtgacctaagacactgacatgacctcatgactagcaagaccaaactttgagaaagctgctccattccagaaatcaatgctaacagatggcaacacaaggcctagataagatctggcttaggctccagaaaagggaattaactttttaaaggatgtttcttgaccttgagaagtagaaagtgcctaaagggccgatctggtggctcacacctgtaatcccagcactttgggaggccaaggcaggtggatcaccaggtcaggagattgagaccatcctggctaacacggtgaaaccctgtctctactaaaaaatataaaaattagccgggcatggtggtgggagtctgtagtcccagctacttgggaggctgaggcaagagaatggcgtgaacccggggggcagagcttgcagtgagccgagattgcgccactgcactccagcctgggcaacaaaccgagactccgtctcaaaaaaaaaaaaaagtgcctaaagttctacattcagtcatctggtccaggcataaaagcaggtgaaggggcctgctgcgctggttattaaaagctctacacatggacaacagctgtactcagcatctactctttaagctgtgaataacacatcaagcttacctgctgctgtccacaaatactacttgaagcacttcacccttggttgcctgagtagtggcagaaagctctctgctaggcctgagggaagaccagaattcctagaggacaggatagattttgacctgatgaacaattattaaggtacacagggaagaatctagatttttttcctttgaagtacctttggtctctaacaaagcacacaaggctctattcaactagctgacagaagttaattagccctctaccccaagggcctgaccctgccctctgctagctttttgttttactgaccttacctcctcaacttcacctccctcctccagctgtttcctcgtatttctgcagcttcctctttcttcccacctctcctttcactttctcccctttcattcagaaatgaatgctcagagagcagatggcaagtagtcaacccaagccagtgaaaacacttcctgagcacctggtacaaagaccagaaacacactgtggctgctggaatacagaatacacgttatccctgtcttttagcagttcatactttaaaggagaaaggcatcatatacttattcctcacatatgaaaagatattttcaggccaatttatttataatatgggacaaaatgattgtttacatcagaactgataacttttactactacagtaatttttccgtggcctcctacatagcacatctagtgaaactgattctgaagcctgatgaagccccatgtatgttctatacactttagctgaggtgttaactctaatcagttaagaaaagcacatgaagagtccaagttggtactacaatgtgtgattagtcttctcccgagagaactgagaaaattcaggtaaacttgactattagagggtaggtttggagtttgttccagtgatctccttaaaaatggcttaggagtttgagataaaactcctgtgggaaacaaggagaaagggatggggcacaaatccacatctcaaatcagtaggttactctttagctgtttctcccagtggcttgaagagccctggtaaacacccagtactcgatatatcaaatggacagcactcagagacagctcagatacagccccacgttcaggctgtggtgagaattccaacccagaaagatgtagtgaagatttccaaaggccagccaggacaccccagggactaacttcccagttcataattttaatcatcttgaatacaaaacaaagacctctctaatgtggactctccttagaaaaatggcttgtgtttagaattatcccagaactattatggaagcatgagtatttcagtaaaataattactgagcacctactaaatgccaggagctgtactgtcactggggatacttctaagaatcttctctactgaagaaaccaagccttgcaaagaaataattataaaacagttacagacatttgtacaaagtgcgtaacgagcactgggaaaggaaatttttaaagggctatttgctcatttgttttcatataagtgatagttttgacactgtagattaccaactagggttgctgaatacaaaaactgatacctaagagatagtatgtgtaggctaagtgtaatgcaaacatttttattggaaactggaagttaccacacattggcttttaaaacttaaaattcctagagtggttcatttttgtggatctgttactaatacaaatttaagtgtatactcagctatcaacacaaatgcagatgttttaaacatttaccctttcacaggttcttttctatgatttttttgtggggctgctgtgtagttattgagtggctagccaggccccagccactgtgtgaccagctgtcctcctgtggggccagcctcaatagtaggggtcaaaagagggccagggcttctctgagagagctggctgtgcactgcacactggaaagccaaggagctaggcatccctctttcttgctgccaggctctggaacatggccactgtgactagatgtagtcctactctagaacaaccctcagcacacagggtaagaacatggatcaaagacagcaccatgggacaccctgctggcatctggtagatattacaggtgtttctcacttgggtcagacttttctccccgaggcctcccaactggaaaaagcaggctggctttaaaaagcaacgtgatagtaaaacaagaatttctcaccacaagatctggattcaagttctgggcctgcccctttaacatctctgggcctatttcttcaaactgcaaaatgaaactaaatactacgtgagaattaaaatgagccacagtatcaggactgggcgcagtggctcatatctgtaatcccagcactttaggaagccaaggtgggaggcctgcttaagcccaggagttcaaaaagtctgagaaacagagcaagaccctgtctctacaaaaaatataaaaaaggtagcaagggtataaacctttgaggttactattctaagaatatgcatgatctgactaaagaacacagtgtctcagatttaagctatgtggcacacctgcctaagatttcaataatgtatttattcacaaacatttattaaggtgcaggtactagcattctggacatcttagaagaaatgtcaaaaagtttaaaacataagactttggggagccgggcgcggtggcttatgcctgtaatcccagcactttgggaggccgaagcgggcagatcacgaggtcaggagtttgagaccagcctggccaacatagtgaaaccctgtctctactaaaaatacaaaaaattagctaggtgtggtggcaggtgcctgtaatccctgctacttgggaggctgaggcaggagaatcgcttgaacccaggaggtggaggttgcagtgagccgagactgcgccactgcactccagcccaggtgacagtgcaagacactgtcttaaaaaaaaaaaaaaaaaaaacagcctttgctctcagtttactatgtagctgaagaaaacaaagcatacacattaaactagagaacagcttaagggcaacatgtccacctgcacatatagcactttttaaaacatgaagaaaagcaaataagaaacaacgcaattagttcaagaatgcttcagtcattaggtgtgatcatgaaggggtgagatttttaatggcaaaaggaatggggctgcttatgggatttatgatgtggggtgttaaaatgtatggatgctgggtctcttggttttgagagaattgtttaagctagctgatcctataaacctaaagaccagggtcagggtcctaaagttaatgcttaagactcccaacccaaggaataatatacatgctatctagtctcttcacaatacatcgttatgtattaatctctttatgaatagttaccaacaacaaaaaaacaaccaaaatgattccatcccaaagagaaatatgcaggaattctcattgaggcaataccactaaattctgaggcaacttaaagcttcctctgtaagaagcttaaaagagaatgactgaaaaaggatacctaggaggcaactatttagtctttttggagacaatgtcatcaattcttggtgatctgtactgaaagtgtgcacagcttacatcaaaaccacttactttggtcttacaattggtcttactttgcaagaccaattctgggagcaacatttacttatccaattatacttggacttaggctagcatttagattaattcaaattttctggcttcacatctgaggagttattagtattaaaataccttctccaataatccacccagttaacgaatagcttgtgaaacagacttctacagtgctttgcttttagggaatactaaattcttcccatctcgcccatcaatattaaaactgtcagcactgcatttagctcattgggaaatataaatatattcagttcctgggtctgtagagttaaaaaatacatgtatttaccaaatcaaccagggtaggggaagatgtgattgagaacaggataaattggaaaggtagaatataacccattgttaactcatattaagggagtgacatgttttaaggatctggagtcactgaaaccagctttaacacttcagtaatatgaatttgggtacagacaaaaatgctgatatggcaactggagatgggaagacaaatccaaacagcatcttgaagaactctatttggcaagtaaacacatctctaggttaatctaaatcatagatgcggtggcaccctgaagacacagaacttgactatcaccttgctgcaaatttactatttttagagtacaaaggagccatttgagttttctttggaatgtgcttgttacactgcgaaccaacattttacatttctagccttaagttgtggatgtcagccaggtgcgctggctcacacctgtattcccagcactttgggaggccgaggcgggcggatcacttgagatcagaagttcagagaccagctgagccaacatagtgaaaccctgtctctatgaaaaatacaaaaattagccaggtgtggtgatgggcacctgtaataccagctacttgggaggcaggagaatcgcttgaacccgggaggcggaggttgcagtgagccgagattgtgccactacactccagcctgggtgacagagtgagaccctgtgtcaaaaacaaagacaaaaaaaatgtgaatgtcactcttggtgttattttatagttcaaatttctaccaccgttaagggtagaagacattcacccagcacttcccagtcctatctaaaggttataccttcccttttgcttgactgatcctataatcttatgtattaagccttaataattgttgaaagcttatcccaaaatgacatataaagactcctcctctaatacacagcacctgagggaacaattctaccatggtttttcttagcactttacaatctccaggtttagcacttttctttctacaaggagaattctgaattttcatttgcctaatttgtggcttcagagtgcatcttcaaaagttatttaaaaattatcaaagggacaccagagctaacatttacaggattaaagacaggcttcaatctagttagtgccctttcagctgtcaatccaatttgcagcaagactactagttaacagtaactaccttctgtagctttccttgctacttagtgttaccttagcaggcagggaaatctctactgtgtaaacttgattacttttccccccacaagaagtccactttgtccacttttagtgctttattctttgaaacagactgattttctaaaattaacattttaaggccagttgtcccacacctgtcttctggatgactaaatcccatcatatgggcctaaaaggtttagtattctcaatgacaatttatactgtaaacaggagacaagtttgtgtcctttccattttttataaaagaaacctggggagaaagcggtgatgggaatgacagatactaaaagtgttaaattttcagtaattttcagctgttaatatggcattaactactgtgtctactgactttttgatcacaagacaacctgctacttaagtgaggcctagaaaatagaaaacagctaagctgacacataagtaggattttaagacaaactttaagaacctcttagtaatactgagaagatcatcacacctgaaactgtcactccataaaagcaaactgcaggtctctaaaagcatattcatttcttctagttcataaccaaattgttatgtctagttttccccagcacacctaactcctgttcccaattctcacattcatggccttattattccatacctgatgtacaaggtaggcagaaaaacaagcagacttatgtcttcagtattttcttagtcccagaacctagatttgttacaaaatgagtgcctgtaaggtaaactctgaaaacctaaatggatgcaaaagctgaaaaggggaagaattttacacaaaagatgggaagacaaaggtaaagttgcaagaaaacttacccaaaccatctaactttagagctgatacagaggatcaaggtagttagctggtctctactttgttctatgtatctataatggggattatttcctgcttaattttgtgttatagctccctctagtggctaagtgattttccctagcacttaccaatggagagcagtacagcatgttgtaaaaaaaccaaacaaacaaacaaaaaaaattaagacctatttctacaagttgtttttgttcaaagtgcatttggtggagatgagtatagcatcctagagaagctgtttccactatcttcatgtccacagttctaccaatagttggcacttataagttgtctggtaacagaagtctgatgctttttaacccgatgcttgagtatcaagctgaactaagtgttgttttgcttacctaaacagtaaacttcttatgaaaagtcatgaatgacttttcaccccctgaaatcccagcctagcacctattaaaatgttgtaaattacaaatgttatatttgcctaaattaacttctatatgacagagtcatttattcaatttttattctgtgcattaatgaagcacggagtgatttttataataattaaaaaatccttcctttaatcactacaagctcacaagaaccctcagggttgttaggcattagctttcaaagctaccaagaagcaccgtgaaggtctcaataacaggaataagtactggtttaagtatactataatctcttggggtttgtttaaagcaagttacttttggcagcattactattcattcaatagacaatcacgatagacataatgaacagatgtttcctgataatctctttacttcatgccaatcccagcttttcctataggatctaattggtcaatgttcctttaagtactgatacagaaacaataactcaaaagaatgttgtattgtacactctaggatgcctgagtatttgcttcaatgggatataattgttgagtccactattacaacagaatgtaaagaaatgtgggccatacctttttttcttgtggctgcttcagcctaaaaagatgggggaacttaaaattcaatcaacaaaggattcacaataacaggtttttcagtcaagacaccccagttacagacaaaagcattaggcctgtgtatgctagtacagttcctacaatcccttatatgaactctttggagacagacatatctgggattcagagctgtatgcactttatgaggtacatatataccctgtattacataaaaccctcagcaaagtctgtggcaactgtgcaatgaataatgaagttcaacaggaaacagtttagtcacactaagtgcaaaatgaaggcagcaattctggtcagggttcacatttaattagctcaacaacagaaaatcttttgttttcgtagtttttggatttcaaaaaatggataagagactgtaatctgttttctgcgtttgcagtcttcatactgtgatggaaataatggttatgttacaacagaacttcagtctaacagtttctcatcttttaatactatttatggtaaatacatatatataacttacttgcaatttaaattacaaaattcatatacaaagtaagcaaaaaggcacacataagaaatccaccttgaccacagaaatgtgaaaacaccagccctaatgaccaagacaatgtttcaaagacaacaaacaccaagaaaagttgagattctacaataaatcatattaaacgcaagcactatgatgcacagacgtgagcactgaatatttactaaagcataaaacttaggaaaaatcattttacggggaatctattcatattccaaacagcattttaaaaaacattaaacttagcttagttttaaaaacaaaattcagacccaaacaatcaagaaccagaaaatgggtttcttaccttttgtttccagtaggatgtgggctgaacagcaaggtgggttattcaatctgatgttatgaaaagtaattgcttcttaaagagacttaagtttttccttggttagaaaataattataggctccctaaaatattctaaggggacataaatagggagaagagggggaaattccaagacagcttttgtagtttcaaaagggtgtaactttcttctaataattgccaatacggatagagacctaaaggtccattttctgagactataaataggagcagtccatacttcccatcacagcttttagctgtctggtcatcttaactacaaaacctatgcccctttacctaagtaaacattagatcctctctaatcttcaaattcagcctgtataacaaggaatactgtctcatttcaatgtgaggttagaattactataacttttagtagagcacatctttcaactttaaacactcaaacttgagtgaaggccatttacattttttggtcatttccaaaacattcaatgaacacaaatgaaccaaagtttacttaagtctagctcacattaaccttccaaaattatcattaatcatttattttccctttaataatctgatgaatttttaaaatgttctacacataaaacttcttagaatttcaagaatgtcatgtaaaattattcaaatttttaaacagtaaatctgccttttggccattacattgaattcttagataaaaagagctacatccttaaacttacactaagtacttagtgaaattctgcattcaacttaacatcccctcttcccaacattccacaacgttcattaaaatctaccgattggggtgaccttacacatttcttccactaccaagatttctggttttccttaggtttttaattgtcacccaaataatcaccttaaattcaacttccaactatgattagcacccaagggaaatgttaaagtctatttattttaggtcccctcccccaacctaaatagtaccaaggggctgtcagtagacaaatacaagaagtagcaggctaaaagtttttaactgctttggtagagaacaccaaagtttttggtacaaaataatcttatggttggagaagggcttataaggcaaaattctaaatgcccagctttttattaacaatgattcatccaaagaagcagttaatcttgtgcactcttccctttcaaaaaagaaatgagacttgggttaaaagttctacaggctgagcatggtggctcacacctgtaatcctaacactttgggaggccaaggcaggcagatcacttgaggccaggagttttgggaccagcctgggtaacacagagaaaccacatctctactaaaaatacaaaattagccgggcaagggtggcacacacttgtagtctcagctacttgggagactgaggcacgagaatcactcaaatccaggggtggaggttgcagtgagcctagatcacaccactgccctccagtctggagaacagagcgagactctgtctcaaaaacaaaaaacagttctaatacatctgtgctgatgttaacatttaatacttacctttttttgagatgagtttcattgagaatatcaaaagctatctccaagtgaacattagtagccatcaaccaattttgcacaaaagcctatgttgtctatgaccaccagaaaataagcagcatctatagttttttaaccactttataacaaagtagagaagcttatctttcagatgctagatccatcccccaccgtcatttaccaagttacatacacaaatgccttattctccccttttgctttcccctgaagacttttacaattaacaataaaagatggctaataccattagattgccttttaagaacttttaatttgctaacacattaacacaagagtcaaaatcttatcttacttaacaatttaaagattaactgatagacccagttagaatcttacatgaagaggaaaaaggacaaccatgcatagttttttaaaaaatgtttattttttcaaagaaaacggcaatagccaattggaaacctacttattcttcaactccaattttgttttctttaaatttagaagtgacttactgatttactattttaaacaaaccccccctttcccctttaaatgtttaccatctactcgtgctgaatccttccaaggagattgctccagcgtttatctccaggtcctcgctttgctccttttaccaaaaaacgcaaaacacaattccatcgtgcatcttaagggctccaatcgtcaaaaataggaaaaaaaaaatctttggaatagccaattaagttgaataaaaaaatccacacgaatgcggtttggttggggcaggaatccactcctatgttcctggtaatctgatcccgctccatgaatcctggtaattcatcctccctatcctatccacattatgatttgaatccaatgatccagctccaaggattgggatccagtgagccctctccaatccaaacctttataaccagcaaaaccaaaaaagaggaggcaaaatgttagatactgtaatcaaaaaaggtttctggggaatgatgagttatgtctgtcatcagtttaacagatgcacatcaataactatcaaattccccaaaacaagtttctgaatggtgttcagataaattttagaaacttaatcatcatagagactaattggaagaagcattttgtatttacagttcaactgataatgccaacacttgttactgtacagcgtattacaggtttcgtggttgcaagaagttacgtaatttaagtttactggcattgctacccacctaagtctaaaactaaatctaatgctcccatttgcaatttaatttgtaaattaaagtcttttaaacatatgaaccaattatgaatattagtttaaaggggaaggtgagacttaaaagtattcccaactagattatctacaccaatacattggaactctatattttgctttcattttgtcttaaaaaaatgaaatagcaacgctctatcagtcacacagaggacatgcagatttagcagtattgatattatactctatcttgttggatttaaaaacaccctgtacccacatgtacaccaacagcaggtcacacattaacagttgtaactaagcactgtgacaaattagccagttcttcccacattagtccctattaaaacaaaaatggggggaagggagcaaaataagttgctacaaaatgggcaatataattttgccacaattgccaaggtttaaaaagcaaagcaattgtagctaaagacaactgaataaaatgtttgcaagtgttttaaggaaaatgtatataatcatttttaacccctgccttttagtataaggtcaatactgccaatttcatctgtgacaatagcacttggagtcataccattgcctccattattgatctgatcctcctcaatcctccttttgacaatcctaaaatgattgaaatgtgctccacaatccttaatccaaagcattcttaatccatctcttcagatatgtctacagaaagacacatgaaaagcaagataaacataagaacttccccaggtaagataaccacaaacacccccaacatcccagttcacacaaaccagggcagatagacatttacacaatatcacagtctgaagagtatggagttaactaaatttaaacaatcctgtctatgacatcacttaaaatacaatttatcaaagacacgaagggaatgtagatgttaggagcaaggggatattacaagaatgcaattcaacactttagcccattctgaacaaaacagtttgaattaaaaaatgaaaagattgtactgaataaaggaaaactgtatacaacatgggttctacaaaaagtgtcaccaatcatcttatgtacgagagcgagatctgctatgacggggagaatagcgtggtgatcctctgcttctccttggggagtaactgcgactcctgctgttgcttctgctacggcttctgctacgactacggcttcgagatcgagatcttccataacttggacttctgggcccatcaactttaacccggatgtaggcagtttctccctattggatagacagaactttccattgaaagatctaagctttcatctatcttcagacatgctgaatgaatacaatgtaactaaaaccagaaatctggcaatttacttggacaaccttgcctgaatccttaccttgaaattccactgttaagaccactgtatccaattctggtcaaagaaaagaatacgtgtataacctacctcatgagatctaaacttagtgttatccagttttcgaactgcataggtcatatcttctttccgtacaaactccacgacaccagtgccatctcggtaaacatcagcataacatacatcacctgcttcacgcatgtgatcctttaaatcctgccaacttccacttggaggcagtcctgaaaaagtgattttttttttcttagtaccaattatcttaaatttcacgttaagctggtaaggtacattaggacaaagagtactttaaagtacttaataggtgtacttaagtgataccaggtaaagagagctggtaagattctggaatccagagtccaaaattatttgtaacgatcttcgtatctagtaccgcaacctaatttggtaaatcaccacagcagcaatcctcgtttattaaattcacccaaaaactaaagcaatttaagacctagcatgaaaaatttgcaattattaaacctgtcacgcaagagaaaaattttaggtagttttcgtcccttcacatcaatccacacaaccagtacactcaccagagacaaccactctgttttcagaccgcctggatggggggccatagcgacctcggggagctccgccacctccacccccgccgccgcctcggcctgttccacggccgcttcgaggaaactccacccgcagacggtacccatcgtaatcatagccgtcgcgaccatacaccgcgtcttccgcgtctctgcgggatcgcagaaagtaaaagggatgagaaacaccaggaggagaagctcgctcagttgggaaccagcaaaccccccgcacatgcgcacccaacgtggaagagcccacatgcgccgcataataggaatggcccctcccccacccagaaacacgccaggctcccaaccactacaccagccctcagcgcctcagtttcccgctccagcctgcgaatgggctccggggacgtccaaggcgaggcgccagagaagccacatcaactcagctccttactcgactcctgcatgggcgatacagtctcgccccaacctctctaagagcccccgcttccccgttctctatgttaaggccttggagccttccccaactactcggacctatttcctcaaggctgcaagccccatgccgcctcaccgcgggtcctcgaactcaacgaaggcgaagggcggtcccccgcggcgattcttgaggtcgatgtcgcggatagcgccgtatttgtagaacacgtcctcaatgtccttggttcggatgtctggaggtaagttacccacgtagatgcggcaatcgttgttccctgcggggccacgaatcacaccacctcccgacatggcggtgacgaaaagcgcggactcgagaacaggccttcccaccaagcctagcgcacggcagagcgagcccgcagcggcaccacgtctcccgcggcccctccaaaatggcgcctttatcagctcggcgcacggatatgggggggagacagaggaagagaagcggaaggaaacagcgattcgatcccaacacgcacgcgcgggagcgcaacgggtgctgcgagggctacgttcagcgcacgcgcacgcacgcgcgacgtcaccctccccacgaagggggtaaaaaagtcccccgcgttcccagcttggggtggtttgcgaacagagtgaccagccgtttggtaaaagttaaataacgaactttcgttaaaggagctagtcatccaggtcgggtcttgaaggatggtcgatttctccaggaatgaggatctttgaaagcaactcggcgccttcaaagcacttggtgaaacctagcctaaagcgttgtcccaccatgctctgcggcgataacggcctttggcgggaaagagtctcggaggcggggccaaagggggacggcccgggcggttgctccggaaacccgggtatcttcgtagggtgcgtctaatccagagctgagttgcgggtgattgaacggagagctggggcgttggtttgtcttcccgcccctgctgcgaatagaccgtggctgcttagacagatgtgtctaatttagcgaaaccgatttagattccttaatcctcttcattaagtaccgttccgccttctcgtcagaactttgcatagctcgggtcagcactcctagtgctagtcgcagtgggtccgtatcccgaccggcaacgtggtacccgccaaccagaaggggtaacaccgtaccgcctatgggacccacacctttttatctcttgttagtcgcctgtccgtgggactagcgcagaatgcctgcagaatgaatcgtttctgttgtttcctttcaaagaacgagaaggaagaaagggtgcgtgtgtgcagtccttttttcaaaagttttccctaaaagttactgatacaccaggttttgaaaataccggtcctctcaggtaataaaatggagcaaaatggatgtgagaaccgtaaccactagataccgcggttgctattcaggactgtgatcctgtttgcctgcggcattgggagataacattttacattttttttcgacgtctgaaatctggatttttatgtgaaatcctgggatttttaaacgtcgctaatgaattaaaattcaaatcaggctgggcgcggtggctcacgccagcactttgggaggccgaggcggttggatcacttgaggtcaggaattcgagaccagcctggccaacatggtgaaatcccgtctctactgaaaaaacaaaaaattagccgggcttggtggcaggcgcctgtaatccactctacgcgggaggctgaggcaggagaatcgctagaaccctggaggcggaggttgcagtgagctgagatggcgccattgcactgcagcctgggctacagagtgagactcctccaaaaaaaaaaaaaaggagggggaaacaacaacaaattaaaatcaaaccctgcagtcataaatttgccataacagatctacacactgaatttaagggataattttcttcatgttatttatttacagtagtccctttccgcaaggatgtgaggcaacttacag[135 bp omitted]ttctaaaaatacaaaacattagctgggtatggtggcgcgtgcctgtaatcccagctactcggtagggtgagacaggacaatctcttgaacccttaggaggtggaggctgcagtgagcggaaatcacgccactgcactccagcctgggtgacagaacaagactccatctcacacacacacaaaaaaaatgctagagtaagaaatcagaggaatgggaaaatgaggggtggattaaatgaaatacgcataaattactatacaaaatgcctgcagtgaaagcccgttgaatttgttgagatagattgcaaattttactttagtcttcccagaagtcacggtaaagaagggtacagaagtattgtgtattcaaaatccaaagtgcctttgggataaaagtaaataggtcattcaggagaaggacatgttttcttaattctaaaagctgatgaaatatattttacaaatgtttctcggtgaccccaaaatacaaattcaatttgaaatgagcagggatgcttggtcttgtggccgtagatcctcggtatatctacagatgacctttggtaatccttgagctttctgtaatattttcgaaaattatatgcatgtgtgcatgtacaaaattatatgcatgtgtgtacttttttctgggaagaggatttggaattttaatcaacttcttaaaggagtccatagatcccaaaaggaaaaagaacttctgaaatttgtcaagggaaggatagattgcctattcttcagaccatcctttaagtatatatatagatgtgtgtttgtgtgtgtgtgtgtatatatatatatatatatatatatattttttttttttttttgagacagagttgccctctgtcacccaggctggagtgcaatggcatgatctcagctcagtgcaacctctgcttccctggcctaagtcattcttgtgcctcagccttccgagtagctggaattacagacatgtgccacgatgcccagctaatttttgtatttttggtagctgggattacaggcatgagccaccacgtccagctaatttttgtatttttagtagagacggggtttcgtcatgttggccatgctggtctcgaactcctggcctcaagtgatcctccggccttggcc[132 bp omitted]ctgcagcctcgacctcctggacccaagcgattctcccacctcagtgtccttcgtagctgagactacaggtatgcatcaccacttcagactgatttttgtattttttgtagcgatggggtctcgccatgttgcccaggctgcttttgaactcctgaagtcaagcgatccttccatctcggcctcccaaagtggggggattacaggcatgagccattgtgcctggccagagcctgatatgtttttaaatgagaaggtgaccaaaaaagatactatttcaacaaatctactgtttctagcattgttccattaagtgaatggcagaaaagaggagagtttttaaaaacttgcagcctgttgattctttcattcaacagttatttgctgaacacattttctttctgttcttttatacatcagtttaaatttatgcaggcaaagcttctgttaatcataagtcaatgataactgaagtgataactgaaatcagtagtttataattggatagttcattttaagaagggatgagacaatacacataggtacttttaatttcaaggtaatttcattccagaaaaatataattgaatttgctttttgtttgtttgtttgaggtggagtctcgctctgtcacccaggctgaagtacagtggcaggatctcggcttactgcaatatcctccacccaggttcaagtgattctcgtgcctcagcctcctgagtagctgggactacaggcatatgccaccacgcctggctaatttttatatttttagtagagatggggtttcatcatgttggctaggctggtcttgaactcctgacctcaagtgatctgcccaccttggcttcccaaactgctgggattacaggcatgagccaccacacccaacctgaatttgctttgatttattcttgtctaatttaatgcagtaatttctgattttgttcagttcagcacagtacaaagtaaaacttaattgagagtgaataggacattcttatttctgttggcatctttttttgtatttgaatgtaaccaactgttctggagttgatgatgaggtcagtatatggcaggaaaagtcttgacggctgttttatcaggtcttgcaggatggcgttagctttgtgatgattacaattaaggatgttaccagttatccagagttaacatatttcagtccacaagagtaaaacatcaaaaaagcaagtaaacaatttatttggaaataagaacaaaacaaggtgaatcattttgagggatatttcattcagatcctgagacctgataaacgatccctgcccccacagcaaagtatttctctccaagacaggaaaattcacagcacctggattctgtgtctctgttcctgggcagtgctgggtagagactggcaattatctttctacaggctaatcttcacacagttctctaaacaatatactagatggttgattccttttgtgctgagcaaattacaaccacttccagttttgcctcctaagattacattctcatcttaattggagtttgagggttttctaaactccttagttatacattcactggcatttttattaattgctgccacaaccagctgatttagtaagcatggactttaccaacttcattgtcggaagcaacctaatttttaacactattactgtttattaaaagttccttcctccaagagaaactttttaaatacttttgattcaatccaataatctcaggaggagacttttaaaagttcatggaaaatgtgtattatgaacaaatcatgcatggatttcaaaatttttttacaccaaaataaactcatactaacttgttataacatgtatgaacaggatctagtttgaggtactaaaaagaataagacatatgtttgaaaagagcccctatcagagcaacatgtattctgttaaaattgaagcaaggacaaacatcaaatttatgatgaaccttgggtgaaaaaatggtgaaatcattaattctttaccaaaagtttatgggcacaatgcctcaaag[145 bp omitted]gaaaccccgtctctactaaaaatacaaaattagccaggcgtggtggcacatgcctgtaatcccagctactagggagggtgaggcaggagaatcacttgaacctgggaggtggaggttgcggtgagctgagaccgcgccattgcactccagcctgggcaacaagagcaaaactccgtctcaaaaaaaaaaaaaaaagggatgagacactgttgaagaggaagcctgcagtggcagactacccacatcaatttgcaaggaaaaaattaatcttgtcatgcttgaaggcaataataaatacagtggtccgttttcaagacaaaatgccttacatgggcttaggtcagcaaactacagaagaaacagaacatactagacccctacttggacagctgatgcctgcttgtcagcctccctcttcccccgcacttctctttccccccttagttgccttcacccaaaccaaaaaagtttagtataagatgaaagtttactagtctgcaaaatagctcattttgtcttctcttatcagcctgcccagctacttaggtcataagttaaatacttgaattgcccctgacctaactaggattgcaatgcattgtgggctgcaataaaatgcagcaagacaaccctaagaaaaccctaaagcccctacccgacaattaatagtcaatgtctgggaagattgtgaccccatagtacgcagcctgtgagaaaccaggggagggacctgc[215 bp omitted]gaggcaggagaatcacttgaacctgggaggtggaggttgcagtgagctgagattgcgccactgcactccagcctggttgacagaacaagactccgtctcaaaaaaaacaactatgctggggcctggtgtggtggctcacacctgtaatcccagcaccttggaaggctgaggcgggtggatcaccatatgtcaggagtttgagaccagcctagccaacatggcaaaactccatctctactaaaaatacaaaaattatctgggcatggtggcaggtgcctataatcccagctacttgggaggctgaggcaggaaaatcacttgaacctgggagacggaggttgcagtcagccaagatcgtgccactgcaccccagcctgggtgacaagagcaaaactccatctcaaaaaaataaaatttaatttaaaaaaaactgtgctgggtgtgcctgtctatcagacacccaatcttgcaagactgtcattaaaagtctcacttttgctgttctctgggtctctgagacaattctttgggtttggatgggtaagtttgtttctcacatgctctcataaaagacgaccaacaattaatagcagaaaccaaagccaataccatagacatctcaattggtttggctcacacaattctaactgaaaaatttaagctgagcaaattttccactcaaaggttactaaaactgcacacccagatcagctgcacacaagagcagagctttccatggagattttaaacaagtgcgatcaagatcctgaagcatttttttgaagaattgtaacaggacatgaaacatggttttaccagtacaatcctgaaggcaaagtataatcaaaacaatggatactaggaggtggaagtggtccagtcaaagcaaaaatggatcagtcccagagcaaagatcatggcaccagttttttttggctgctcaaggcattttgcttgttgactttctggagggccaaagaatgataatttgtgcttattatgagaataagcagatatgcttattatgagaaagccaaaactttagcaaaaaaaaaaaaaaaaaaaaactgcccaggaaagcttcactggagagttccccaccatgacaatgctcctgctcattcctctcaagcaagggcaattttgcaagaggtttaatgggaaatcattaggcatccacctggcagtctttatttgactccttctgacatctttttgtttcttaatctttaaaaatgtttaaatggcacccctttttttttttaataataatgtgaaaaagggctgggcacggtggctcatgcctggaatcccagcactttgggaggccaaggtgggcagatcacctgaggtcaggagttcaagaccagcctggccaacatggtgaaaccccgtctctactaaaaatacgaaaaattagccaggtatggtggcgtgcgcctggaatcagctactcgtgggggctgagacaggagaatcacttgaatccgggaggcagaggttgcagtgagctgagattgcaccactacactccaacctgggcgacagagtgagactccatctaaaaaaaataaacaaaataaattttaaaaaatttaaaaagtgaaaaagagtacattgacatggttaaattcccaggacctgaagttctttagggatggactaaatggctggtatcattacttatgaaagtgtcttgagcttgatggagcttatatggagaaataaagtttttatttttattttttaattccattttttccataaacttcctgaagttccctcatattagtgtcagcaccatactttaccctggaaatgattacttggggggtaggagaagaaagaaattcaaagagttaac[138 bp omitted]gcctc[212 bp omitted]ctactcaaaactccacctgtggtgatagttacataactgtgcacatatttaaaatcatggcattgtctacttagagcagatgaattgtatggtatgtaaattataactcagtaactttttttttccaaatgactgggggaagaaatacctctgtatctccacagttagaaaaatctctctccagtaccaatcctccaaaggtattattgggagtgggggaagtccaagagtaatttgcactgaaatacggctttcctaatctggaaactctgtttccaacattttttgtgccaaccctactgtcttttgagcgcataattcttatttttactactaggtaaagagacacttagaaaggttgggattaccactcgattccactgtgtacaggagtttacttccagaaacaattcacttgcaagattctctgttcccttgctccacttgattcagggataaatattctctgaaaaggaaagaaaccgtgtattttaaattttcatttatattcgtctcatcttccttagtaagttatattgaggacagatttctgctgtaactccctttattaccagtatattatctgttaaaatgaatattattgactatttactgactgctctttgaaaaagttgggaagttaggtgagcagaatgctgtttatatggaaacttcatcatgttgctgtcagtgaatagacacaatgggtataaagatttttttatttcttttcattttttaatttttattattatttttttaagacggagtctctctctgttgcccaggctggagtgcaatggcacaatctcagctcactgcaacctccgcatcccaggttcaagcaattctcctgcctcagcctcctgagtagctgagattacaggtgtgtgccaccttgtctggttaattttttatttttttagtagagatggggttggggggggtggtctcaccatgttggccaggctggtcttgaactccggacctcgtgatccacccacctcagcctcccaaagtgctgggattacaggtgtgagccaccatgcccagcctgtttttttacttcacagtataataaagatggccaagccaggcgtggtggctcacgcctgtaatcccagcgctttgggaggccaaggcgaggcagatcacaaggtcaggagttcgagatcatcctggctgacacagtgaaaccctgtctctactaaaatacaaaaaaaactagctgagcataggtggtgcatgcctgtagtcccagctactcgggaagctgaggcaggagaatggtgtaaaacctgggaggtggagcttgcagtgagccaagatcgcgccactgcactccagcctgggagacagagcaagaatccgtctcaaaaaaaaaaaaaaaaaaaaaaaaaaaaaaaaaaaaagatggccaccttttaagcccaaataagtcatctaataatatagtcttagtaattttattttaggacttgcccacctcattctttcattcattttgtttcatctttggctaattctttccatctttattgtcccgttactgataataatagaatatgactttggcaggaaacagctcttaaaatgatctattatgggctgggtgcagtggctcatgtctataatcctagcattttgggatgctgaggcagatggatcacttgagatcaggagttcaagaccagcctggccaacatggcaaaaccccatctgtagaaaaatacaaaaaattagccgggagtggtggcatgcgcctgtaatcccagctacttgggaggctgaggcaggagaatcacttgaacccgagaggtggaggttgcaatgagctaaggtcgtgccactgcacttcagcctgggtgacaaagcaagactctgtctcaaaaaaaaaaaaatcgattatgaaaagatgtattttcaccatgtttttcttttcttattactactataattgctctccccttatttctgcctagttctttctttttcaaactccaattcatattatacatttcctaattagagtaagtagctctttaaggtcctataaaaacatattgcagacatactttatttgcgaaaaatgctacctttgtttttgtgattcttttttttttttttttttgagatggagtctgactctgttgcccaggctggagtgcgatggtgcaatcttgctcactgcaacctccacctcctgggctcaagcaattcccctgcctcagcctcccaagtagctgggattacaggcacgcgccaccatgcccagctaagttttgtatttttagtagagatggggtttcatcatgttggccaggctggagtgcgatggtgcaatcttggctcactgcaacctccacctcccgggctcaagcaattcccctgcctc[134 bp omitted]cggccccccaaagtgctgggattacaggcctgagccaccgtgcccggccgtttttgtgattcttatgctgtgagtcctatataaatgttagctatctttattaatagtaatagtggtattctgtgttactactactatcaagtatgttagaaaattaattttgataaattttttagtttcaggttttgagtatgtgacagttttttcctctttactcttttcaaaaggtattccagattaggtgagctaaaaatctctcacagttacttttgtgtatttacttgcaggaccattgcagagcttattagaccgagagcactgggtcagcaaactacagtcctctgacccacggcctgttctttggaatgcccatgagttaagaatgttttttatatttttcagtggttaaaaaacacacaaaagaagaataatattttgtgcatgtgaaaagtatatgaaaatcaaatttcagtgtccatatttaagttttattggaacacagccatgaccacttgtttacatattgtctatggctggtttcattcaa[136 bp omitted]acatggtgaaactctgtctctactaaaaatacaaaaaattagctgggtgtggtggcacgtgcctatagtttcagctactcgggagtttgaggcaggagaaccgcttgcaccttggaggcagaggttgcagtgagccgagatctcgccactgcactccagcctgggtgaaagagcaagactccatctcaggaaaaaaaaaaaaaaaaaaagacttcatggctcacaagcccaaaatatttactatctggccctttacagaaaaagtttgtcaaccccttaccaaaaggaaaataataacctgcttctgtcatttgtgcttaacctaattcaaatattcagctttgtcatgcgtgtccttttcctcttgcagatgtttctgtcatgggtaatatattattagttgtcaacataaataatgaaccttttcaagcgataggttgctaacacgtgtttcatcagccactactacagttcagtgataaggtactgagagctggtggaaagaaattctcctgcccatctgcccagcctagaagaggaggtattgctctactgcagttgatttctttttctttctttctttctctttctttctttcttttttaagtctagttgatcaaaattgctcaatgatggcaggtttctgtaaccattcttgcgttgaagtaatgtggcacacaatgagtccatgacaggttttgttctaagtaaatattagtgtccactcactatggaatttgcaagtgaaatttccaaaatgttcatattgtttttctacaatactgggatcattcactctcaggctggtgctggtaccaccaccctgtccccaggaggctactagatgtgtttacagtttacagtccagacccatgtccagggggtctttccttgtttgcctcccatctgtttccatgtggccaggagccactctgctcaccagctgcaattcactccaggttaatttctgctccatcaaattaagactccaggggagaaaaaaattatttcccctggctctgagtctccagttttttggagacctgagagaccctgtttacagatacacacacagcaagggaagcacatgccagtagttctagctactcaggatgctgaggtggcggatcactggagcccagaagttccaggctgcagtaagctctaattgtacctgcaccccagcctggcgacagagtgagactctgtctcagaaaaaaaaaaaaatatatatatatatatatttgcattcagaaaaaaggtttgtttataacttttcccaagagaagtgagtgttgctttaaatttgtgcaactgaagagcctctttaggcagacttcctaacacaaaggaaacagtctgtcctaaagaattattcaggttttccacctctatagatacaataactgcttatcaccttagtatacattttcttagcctcaactaaatccaggctaggaaaattataggcatttgcctgggcaccttgttaataatgttatgtcataattctagtaagtttcttataaattcttaattactttgcaaatacacataggaaaatatggggctctatttacatttcccatctgacaatacagttttaaaattctctaattgctcttaagaaaatatacttctctagatatttatacagggatttgtgttgccacaaatttgaatggcaaagccaatgcccccaacagattcattgtcttccccagagagcatcaatcattgttgagcatttgtctaaataaaacacttgtttgagagcgtgggcgacatggcgaagccttgcctctacaaaaaatacaaaaattagctgggcaatgtggcacgcgcctgtggtcccagctacttaagaggctgaggtgggaggatcgcttgaacctgggaggtggaggttgcagcgagccaagattgcgccactgcccttcagcctgggcgacagagtgataccctgtcaaaaaaaaaaaaaaaaaaaaagtacttgtttggggatggtataaattactagaggttctcaccaagcatgttttgcactgtactaagttattaatactaaaacagtttccaaggtttacaccactgtaaatagaaaataaagatacctgttatcagccagcttctgttagataaggctgcagtaataaacaactccaaacatatcagtgtcttaagaaaataaccgaggtttgcttcttgcttatgttacatattggtagccacgagttggcagaggcacagcccatgtatcttatcactaaaaggcatgaaagtgcagcagaaagatgggcttttaacgagatggatttgggcttaaatccccaataccacttcttacttgtgtgatcttgcatgactctcttaacctgcttaagcctgtatttcttcacctataaaatggggtcaataatagcacttatagagctgttgtgaagattaaatgaaataacatggaaatcaactagtcgttgagtgccctgaatatagtagcactctatgctctgcgctactctgtgccctgcaccataataaacagtggttattattaaggctgcaaaaacctatctccttgctttttcaacatttgtggttagactgatcaactttactcttctttggaagaaggaataagatgcgaaattcaagtcagtctgtcttatgactaattagatattatgaggctgggcgcagtggctcatgcctataatcccagcacttcgggaggctg[135 bp omitted]gaagtgggagaatcacttgaacccgggaggcagagtttgcagtgagcagagattgcgccactgcactccaggcggggcaaccgtgccccgcctagtttttcttttttaaaaacattgatttttttttaagatggagtctctctgttgcccaggctggagtgcagtggtgtgatcatagctcactacagcctgaaactcctggaatcacatgatccttctgtctcagcctcctgagtagctggaactacagctgtgcatcaccatgtcccacccctggctaatttttgggttttttgtaatgagggtctcaccatgttgcccaagctggtcttgaactcctgacttcatatgatcctcttgcctcaggctcctgattcactgggattacaagtgtaagccactaaacccagtagtttttcttaagtcttcaaactcaacttacaaatcttgataattattaatctaatcctatgttatataagaaataagattcattatttttacttgttctgtgattaatattcaactaatacttattttaaaaaatacttatatgtaaaaaattaaatcccggccaggccacggtggctcacgcctgtaatcccagcactctgggaggcggaagcgggtggatcacctgaaatcaggagttcaagaccagcctgaccaacatggtgaaaccccatctctactaaatacaaaaaattagccaggtatagtggcgcatgcttgtaatcccagctacttgggaggttgaggcaggagaattgcttgaacctgggaggtggaggttgcagtgagctgagattgcaccattgcactccagcctgggcaataagagcaaaactctgtctcaaaaaaaaaaaaaaaaaaagattaaatccctaaacatttagcatattatataagtagttcattaacttttattaaatatttcaagtaattaaaaatttaatatatcttattccctcaaacacttcaaattcctaacaaggttcattagtcagggttcaatgcaggaaacagaaacactctagttttttttttttcttgagatggagttttgctcttgttgcccaggctggagtgcaatggcgcgatcttgggctcaccgcaacctccgccttccgggttcaagggattttcctgcctcagcctcctgagtagctggaattgcaggcatgtgtcaccacacccagctaattttgtatttttttagcagagacagggtttctccattttggtcaggctggtctggaactcctgacctcaggtgatccacctaccttggcctcccaaagtgctgggattacaggcatgagccacctcgccctgcctactgtaggtattttaagcagaaagggattaaatacagtagattagattaggtatttagaaactttttggaagagatggaggggtaggctctaggcatatctctggcatgactcccagaatgttgcagaactggtctatcaagaatgatgcttcctttgctacagacaggaaagtggagatccagaggccaaaagtaaactactgggatcaaaagattcctggcatattgaccaaaatgccattcagagatcataaagccaggatcaggaagctgtagaagccaccaccacaactgtctcatcactgaattgtactatctggctgccactgctgcagtggattctcaacaccatagagactgaagccgaaatgtcactagcagtacatactgcgtagcatcaggaagagggaccttgccgcttttctccacggtcttgtttggtaattgttgctcatatacatgtcgtgatttgtctaagtgaattgaaacctccatgaggaaaggtgttgtgactttttagttttcagcccgaggcacaggcaaacagaagttgctcagtaaatggactttgatggttgggtattctctattttgatactgtcatcttgatgccttggtttttgatggattatcctcatcttccagattcattagctcgattttcagtacaccagccaaaaacaaatgagcttacacagaaagcactattgcaatgggaaaggataactgggtcacttccattggcacttccaattccaattaaaaacagaggcatccactgcagacattactaagtagctattttgctgtggatagtagatgtttggtagtggttggctgtagctaaaagttttagtttgctgcatagtccacctatagatctaattggtgtaacttaatttacacccagaatgctagctgcacaagtgtgttgggaatgacactcacggccatcacgtaaatctgatataaagaaaaatgtcctaatgtaacactacttaccaatccaataataacataattatatttagaaaattggccgggtgcagtggctcacacctgtaaccccagcactttgggaggccgaggcgggcagatcacatgaggttgggagttcgacaccagtctgaccaatatggagaaaccccgtctctactaaaaatacaaaattagccgggcatggtggtgcatgcctgtaatcccagctactcgggtggctgaggcaggagaatcacttgaacccgagagacggaggttgc[131 bp omitted]ctataatcccagcactttgaaaggctgaagtgggaggattgcttgaacccaggggttcaagaccagcttgggcaatatagtaagaatatgtctccacaaaaaatttagataattagccagcatggtggctcatgcctatagtcccagctactcagaagactgaggcagaaggattgcttgagcccaggaatccaaggctgcagtgagctatgtttgcaccactgcactccagcctgggcaacagagcaagacaactgtccctgccccatacctcccctccactccactccccacagaagaaaacaaaaagggctttcaacattacagtgagctataaagtaaaaaataaatgaataaataaattaaattaaccaaattgtctttaatttttaaaaattaaaatcacaaatattggctgggtgaggtagctaacacctttaatcccagcactttgggaggccgaggccggaaaggatcacttgagcccagggctcgacgagaccagcctgtgcaatataatgagacctcatttctactaaaaaaaaaaaaattatctgggtgtggtaatgcacagctatagtcccagctacttgggaggctgaggcaggaggattgcttgtgcccagtagtttgaggctgcagtgagctatgattgcactgccaccactgcattccagcctaggcaacagagcaagaccctatcttgcaggaaaaaaaaagaaagaaaaagaaaagtaaagaaaactagtaagaagacacttgaggtttgagccatataggaaaatagaaagtagagggggaagtgatgggtgacttggcaagctggaagagttacagaagggcaaatgtgggcaccctaaataacaagctggttccctctcaaaacccataaaaggctcagaaacagattctaggtaccagggaaggtggggttagcacagaatataaaatctctggaaaagtttgatttgacaaaaagcagaaagactacagccagagatttcctttcagtgaagtcccacccatatatatggtgctttcaataaacttttaatgccttataagtatgaatagccagcctaggattgctagggatgtttaaggaaaatgtccaatgagagagattgaagtgaacacaggaaaaaaagagggttcagagaaaacagatacaatgtgaggtacaggaaaaaacttcaaagaaactataattagtttccccaaatggataaaagataatatatctctacaaactagtaacaggaatatctatctatctgccatctatcttttatacatatgtatacactctcacacacacatccatgcattcatgcatatgtatgtatatatattaaaaatcagggaataagagagaaacactttaaaattcataatatgatagaaaaaattaaagaaaaactaaacagaagagttagaagataaaatcaagcatgcttcttagaaattagaacagataaactaaatagataacactaaggagaaaaaagataaaaaaataaaagatttatgaagtttaaaaactacaaatgggcactccaaaaaagcagagtggtagagaaaatattgttattaaagagagagtacaaaaacatttccagaacagaagaacattaatcttcaaattgataaggcgcaacaccatgaaatcttagaacattatggattaagaaaatatcctaaaagcctttaaagaacaaaataggttacacacaaaaaacaggaatcagatgtcattagatttctcaacaatgtagggagctaaaatcaacaataacaatgatggagcaatttctttacatttctgagtaaaaattatttttaatgttcaattctaaatctagccaaactctcaatcgtgagtgaagccacaattttcagcagtgcattttctattctttctttctttctttctttctttctttctttctttctttctttctttctttctttctttcttccttccttccttccttccttcctttctttcctttctttctttccttcttttttgcttatctgtgacttttgcccatttttgctcttattattaaagtgcattttccatttactatttctccagaagctgctggaggatatgttccaccaaaataaagaaacaaaccatgaaaaaggaagacattggatgcagggaacaagaggtttacagagagagacaaaggaattttcagcatgatatcaaggaacagatccaggacaacgattctatagcttcgttagaggactgctttattttattattttattctattctattctatattttattttattttttattttattttatattttttgagacggcgtctgactctggtgcccaggctggagtacagtggcgccatctcagctcactgcaacctctgcctcccaggttcaagtgattctcctgcctcagcctcctgagtagctgggattacaggcacgtgccaccacacccagctaatttttgaatttttagtagagatggattttcgccaggctagtctcaaactcctgatctcaggtgatccgcctgcctctgcctctcaaagtgctgggattacaggtgtgagccaccacgcctggccaaggactgctagtttagattggaggggtgaccatggaaaactgcaggtgtggtatctctgggcaggaggtggggagagaaggaactggtagatcatctgacagcattgaccaactgaccgtgtaaaacttgcatgaaaacacttcaatgttgggtagtgttgcaagatttaactataagtttaaggtaatctaagtgcatgaaaaatgggatcgatacattcatacagtggaatattgcttagcaataaaaatgaatgagctatcaaaccatgaaaagatatggaaaaatcttaaatgcatattgctaagtgaaagagaggagtctgaaaaaactgcatgctgtatttcaattatatgacattttggaaaaggcaaaattactgaaatggtaaacagatcagtggtcaacagggtctcaaggaggaaggttgaataggtgaagcaatcagggttttttggggagatgaaatgattctgcatgacactgtaatagtgaacatgagacattaggcatttgttaaaaccctaaaactactatacaaaaagtaaagtttaatgtatgaaaatttaaatcatttaggaggttgggggaactcagcacgaaatgcagaatgtgacaaaggaatctaaatgtgttgcgaacatacaaagcaatctttccagagaggatgagggaataagggtctgacctctgtaactttggaaatgagtggagtctgtaattataaggcaaaaggcattctatataaacaccgtaaatatactagttaattaaaaaaaaactagttgtttctcacagggatacaggttaagaattccaaaatcattatacatgtatattggaattgaacaattaagaaaatggatggccaatggtgaaagtggggttctctttgttagaaggaaagcttacagacaagcaagaggcagaggctagaataatctgtgtggtaattagaattagagaaatcagcatgaactcgtgtttaccttaatatggtttggatgtatgtctccaccaaagctcatgttgaaatgagatccccaatgttagaggtggagcctgatgagaaatgtttgggtcttgggtgtggatccttcatgaatggattggtgctgtccttgtgataatgggtgagttcttgctcagttagttcatgtgagatctggttgtttaaaagagcctggggccaggcgtggtggctcacgcctataatcccagcattttgggaagccaaggcaggcggatcacgaggtcaggagttccagaccagcctggccaatatggtgaaactccgtttccagaccagcctggcccatatggtgaaattccgtctctactgaaaatacaaaaattagccaggtgtggtggtgtgtgcctgtagtcccagctacttgggaagctgaggaagaagaatcgcttgaacccaggatgtggaggttgcagtgagccaagattgtgccactgcactccagcctgggtgacagatcaagactctgtctcaaaaacaaaactaaacaaaaccaaaccatgaggatttaataaaaggactcctaaagctctttgccagaaagaagccccactgccacccagagaaggcagaggcagggagaattgcttgaacccaggaggcagaggctgcagtgagccaagatcacatggctgcactccagcctgggtgacagagcaagtctctgcctcaaaaaaaaaaaaaaaaaaaaaagagtctgggacctcccactttctctctctctcttgctctctctcttgccatgtgacatgcttgctgctgcttcaccatccaccatgagtaaaagctccttggggcctcaccagaagccaagcagatgctagtgtcatgctttctatacagcctgcagaatcttgagccaactgaatcttttttctttataaattacccagccttaggtatttctttttagtaatgcaaaaactgactaacacagatggctacatatatatatatttataaatatgcatatatatatatatacacacacatgttagtatacacacatatctctccttgctctgtcagctgagagggcctagaagcaagacaccccagtagcaatgagcacacctagcacccagatcttggtttctaataccattctccaataaaagagccagggttccttggaaaaatgattgattgtaggactgggacaggaaatatacgtaatgagtctggagcatcttttagtgccgtaaagtaagaaagtgcatacaaaaccaaaaccaaactaaaaacccaccatgaggccggccacggtagctcatggtggtggcatgtgcctgtaatcccagctactcaggaggctgaggcaggagaattgcttgaacccaggaggtggaggttgcagtgagacgagatcgcaccactgcactccggcctgggcaacagagcaagactccgtctcaaaaaaagaaagaaagaaagaaagaaagaaagaaaaaaaaaaaccaccacaataatggggatatgtataaaggatataggacccaactgacagagcacccaatggcccaagctaaaacaatctgagaaataacaaagaaaaaaaatacacaaagtagtattggagtatcaccaaagtataaatgatataaatacatgattaaatgtattaggagcccagcctgtggttttcttttatagtacagtatagaaatgaagggggcaggctgggtgtggtggctcctgcctgtaatcccagcactttgggaggacgaggcaggtggatcacctgaggtcaggagttcaagaccagcctggccaacatggtgaaaccctgtctctactaaaaaatataaaaattaaccaggtgtggtggtgggtgcctgtagtcccagctacttgggaggctgaggcagggagaattgcttgaaccaggaggcggaggttgcagtgagcggagatcgcgccactgcactccagcctgggtgacagagcgacacaacatctaaaaaaaaaagaaaaaaaaaagacaaatgaaaaggggaaagtaactttagagtgaagaaaactgataaactccatcaagccattcaatcaagattaacatcaacaatgataagtcatattgataacacgtaaccttggtatggcatgataaaaatggcactttacttccgtgatcttcctcttcaaaaatgttacccctgtctaattacaagaacatcagacaaatcctgattgagagtcattctacaaaatgcctgaccagtaatcctcaaaactttcaacattataaaaacaaagagagtctgggaaactattataaccaagaggagtctacagagacatgacaactaaatgtaacaaagtatcatgcgtgggatcttggaacagaagaaggacattagggaaacactgaggaaatctgaatgaagtattaactttagttaataacaatgtatcattagtgtttcattaattgtgacagatatacccactaatgtaatatgagaaactgggtgtggggtatatgggatctttctgttttatcttctcaacaactctgtgaactaaaactattctaaaattttaagagtttatttttaacaatgaggcaatattgattctaagagaaccaaatgaacaaaaaatgaagaaaaatcatagtaaaacattggctcaaccttgagcaatatttacatcatcatcataattaaaatgtaaaacatgggccgggtgcagtggctcatgcctgtaatcccagcactttggaaagctgaggcgggtggatcatgaggtcaagagatcaagaccatcctggccaacatagtgaaaccccgtctttactgaaaatacaaaaattagccaggcggggtggcacgtgcctgtagtccctacagctactcaggaggctgaggcaggagaattgcttgaacttgggaggcagaggttgcagtgagccgagatcgcgccactgcactccagcctggcaacagaacgagactccgtctcaaaaaaaaaaaaataaaaagtaaaacatgaatccaagcaaaattgtgatataagtatatttggaaataggatgggggctgtaagagagttaaacattctcatctaccataataggaagtcatagatgttgtctgcaattgatgaaacaagagagcaatatgctatagaaatatggaagtaattactagaactaaaagattggaaatgcatgctactaggaactgatggggaactatagttattgttgttaagccttaaattattatttcatttttaaatttttattttttttatttttgagacagagtctcactctattgcacagactggagtgcagtggtgtcatctcagctcactgcaacctcagcctccctggctcaagccatcctcccacctcagccccccaagtagctgggactacagacacatgccaccacacctggctaattttgttgttgttgttgctgttgtcattgtttggtttgttttgtacagatggggtttcaccatgttacccaagttgatcttgaactctgaatctgcccacctcagcctctcaaagtgttggttttacaggcatgagctactgcactcagcttatttcactttttaagttatctttaaaaacatatttacagccagg[131 bp omitted]gggcgtggtggcatgcgcctatagtcccagctacttgggaggctgaggcaggagaattgcttgaacctgggaggcggaggttgcagtgagctgagatcgcgccactgcactctagcctgggtgacagagtgagactccatttcaaacaaacaaacaaacaaacaaaaacatatttacatccctaagcatggagaactttgattaaggtttttaaaatatcggccacatgtggtagctcacacctgtaatcctagaattttgggaggccaaggcgagcagatcacttgaggccaggagttcaagactagcctgggcaacatggcaaaaccctgtctccacaaaaaatgcaaaaaaattagatgggtgtgatggcatgtccctgttgtcccaactactcaggagcctgaggtgggaggatcactcgagcccaggaggtgtcaaggttacagtgagctgtgattgtgccactgcactccaacctgggtgatagagtgagaccctgtctcaaaaaaacaaaacaaacaaacaaaaattaaaaatatcatgcttaaagacattaagcatttcaaattgaaataataaattttatataataaattatctaacatcttagaggatttaaattttctaaaacatttcaaatatctacttctataccttcatgagataaagtcccttatccaagagaagctaaccaactaggcttatttagtcgaagactcggtaccacaatatagttatagatttgggttacagtaagatattctgtactaaaatattggttcatagctctatttacaagatgattctacctaaactccagattttcatgccaattccttctaacagtcttggaaataccacctttagatgcaggaaagagtgacccctgctctgggttcaatgctttatagcacttcatatcacaagcacacgtttattttaaaaaacaaaatatgcctttgtcattctgaattctatgctcagcatggaaccagcatgacctatcatcctaaacatccattctcacgatgaatgctcttcaggccccagggcaatgctttttcactgcctgtgcccagtatccatgaaacaaaatggtttgtggctgctgcctgtgctggtgacagaacgctttggatttgagcatcgggggattaggtaagagaaaagacaaattaacttgtcaaatcctttctctcagataacatgaatgcaatagattcttgcataatgaagtactgtttcccaggagtaccacacatctattttcttgcttctctttttgttccatttgtggctcatgctaattaatgtggtatttgcaaaagtttcacattgtgactgaggaatattttgcaatattaaacaattcatattagtcttaaatgtgcctatgtgtaggtaacatgatttgcgatgcatgatacaggttctttattttggtcactagatgaacattgtatactagaattgtgcaatggtctgaatgtgcgtgtctccagctttggtctgttttgttttgctattaaaggaatacctgtggctgggtagtgtgtaaagaaaagaggctaacttagcttatgattatgcaggctctacaagaagcattgcactggcatctgcttggcttctggtaagcaccttggctgcttccactcttggtggaaggggaaggagaatcagcatgtgtagagattgcatggcaagagagatgggaggtaccagtctctttttaccaaccccctctccagggacctaatagagtgagaactcactcaccctcaaggaagggcattaatctattcatgaggcatctgcccccatgatccaaacaccttccattaggacttactttcaacactggggatcaaatttcaacatgaggtttggaggggacaaacatccaaaccacagcaccacctaaaattcatatgttgaaaccaaacccccaatagcataatagtattaagtataatagtactaagtaatagtattaagaagtagggcttttaggaggtaactgggtcatgagggcagagctctcatgaatgggattagttcccttctaaaagaggcctgagggaactcactcactccttccacccaccatgtgagaacacagctagaaggtgccatctacaaggaagtgggtcttcatcagacataaaatctgctggcatcttgatactggacctcccagcctccagaacagtaggcaagaaatttctgttgtttctaaggtactcaaagatgttttgttatagcagtcttaagggactaagacaaattgagaatagttttattttaataaaaatattaagatttaattaaaatgtccaaaaacaaaatgtcaatttaatttaatttatttatgtatttatttgtgacagtcttgctctgtcacccaggctggagtgcagtggcaccatcttggttcactgcaacctctgtctcctgggttcaagcgattctcctgcctcagcctcccgagtatctgggactacaggcacacgccacacacccagttcatttttgtatttttagtagagacagggtttcaccatgttggccagggtagtctagaacttttggcctcaagtgattcgctggcttcggcatctcaaagtgttgggattacagcgtgagccactgtacacagccttaaattatttttagttaaaatattgatatttatttgttgatagcttgaattttttttttttttttttttgagatggagtctcgctctgtcaccgaggctggagtgcaatggcatgatctcagctcactccaacctccgcctcccgacttcaagtgattctcctacctcagcctcctgagtagctgggattacaggtgcacaccgccatgcccagctaatttttgtatttttagtagagatggagtttcaccatattggccaggctggtctcaaactcctaacctcaggtgatccacccaccttggcctcccaaagcgctgggattacaggcgtgagccaccatgcctggtctgaattttgtcttaattttaataggcaatttaagatttaataacagaaatataatttaaatttttcaatatttgacactgaccttaatgtactttttttttttttttttttttttttagacagtctcactctgttacccaggctggagtgcagtggggcgatctcggctcactgcagcctctgcctcccaggttcaagtgattctcctgtctcagcctcccgagtagctgggattacaggtgcgtagccccccaccacacctggctaacttactggctaacttttgtatttttagtagaaacagggtttcaccatgttggccaagctggtctcaaactcctgacctaaggtgatccacccatctcagccttccaaagtgccgggattacaggcgtgagccagtgcacccagacctttaatgtacatttttgatgaaatgtatttaaattgtatatcttttgaacaaaattacattttattttttaatctgttagatcagggcttggcaaaccttttctgtaaagagcttgatagtaataataagtaataagagccagataataagtattttaggcttagcatgcctaataagtattttagctacgtgatctctgtcacagctattcagttctgtggttataggtgattactgcaataagtgaatgagtgtaactatgtgccaataaatgtttacaaaaacatgtcgtgggctgaatttatccagtgggtcatagtttgctgaccccttagatcaatagaatgtaagttatgtgaagaatttagattatagcaacatagttggtgatattgctgaaataaagacaataaaataaattttatggaataaaatataatttgttaattaaacatctttattttataattcacccaaaattgctgcacactaacaaaatgcctggagaagcaaataatgatctgcattactttggatcaggcaacggtgtttcagatacaacaccaaaagcagaagtgacggaagaaaaaatagacaaagtgcacttcatcaaaagtaaaaccatcacaggcttcaaaggacaccatcaagagagtgaaaatacaacccacagaatgggagaaaatagttgcaaaccatctctctgatgacagtctagtatctagattatataaagaacatttacaactcaatgataaaaggacagggccaggtgcggtggctcatgcccgtaatcccagcactttgggaggacaagctgggatgattgcttgagcccaggagtttgaggccagcctgggtgagatggtgaggccccatctctataaaaaatttaaaaattagctgggcatgatggtgcacacttgtcgtcccagctactcaggaagctgaggtgagaggatcgcttgagcccaggaactggaggcagcagtcactgagattgcaccactgcacaccagcctgggcaacagaacaagaccccatctctctctctctatatatatatatataaaataaaaggacaagcaactcaatttaaaaatgggcaaaggatctgaatagacatttctccaaaggagatatacaaatggccaataagcacttgaaaagatgcccaacattattagccatcagggaaacgtaaatgaaaaccacaatgagataccacttcacagccactaggatgggtataatagaagttagataggccgggcgcggtggctcacacctgtaatcctagcactttgggaggccgaggcgggcggattgcctgagttcaggagttcgagaacagcctgggcaacatggtgaaaccttgtctctaataaaatacaaaaagttagctgggcatgggggcatgcgcctgtagtcccagctactcgtgaggctgaggcaggagaattgcttgaacctgggaggcggaggttgcagtgagccgagatcatgccactgcactccacccttagtgacagagcgagactccatctccaaaaaaaaaaaaaaaataataataataataataatagaagttagatagtagcaagttgatgaggtcgtgaagaaatgggaaccctcatacactgctggtaggagtgtaaaaggtgcagcacttggggaaacaatctggccgctcgtcacgtggataaacagagttaccacataatctgacatttccactcctaggtatatatcccccaaagaaggaaaatacatggccacacaaaagcttgtacatgaatgtttatagcagcattatttacaacagccaaaaggtggaaacaacccgtttctatcaactaatgagtagataagcacaatgtacatacccatgcagcagaatattctctcacaataaaaagaaacgaagtactgatacatgctacaatatgaatgaaacttgaaaaccttatgctaagggaaataagctaattagacaaatccatagagacaaagtagatcagtggttgcctagggtatgaattgggagaaaatcggaggtgactgccaatgggtatagagtttttggggtggttaatgaaaatggtttagatttattaggcaataaatctaaatggcaattataatggcaattaatggcaaaaactaatactagtttcttcacagcttcctaaacttgacttagcactacttccctgggtctgccatttaccaagatctccctgaattagtcctaccattgattcactattactgtatggattttcctttgcttatctgtaaagagagaattcaagggtgaatggagtccaggtcctctcacccccctgccctgccccagttcttacattttaccttcactttctcttaagctttttctttatttttatttttgagatggagtctcactctgtcatcccggttggagtgcagtgggccaatctcaactcactgcaacctccatctcccaggctcaagcgattctcctgcctcagcctcccaagtagctgggactacaggcacctgccaccacacccagctaattctttctatttttagtagagatagggtttcatgat[139 bp omitted]tactgcttgctgcctgcatgttacttcctatttttgtagcatggtgctgaagggtagataggtggagggatactttggaactcatgtcaaaggcaaggagataaggagaacaaggattagaccctgggcccttgcattctctgtgttctgtcattatcaaacctcactctcaggagcacaaagctgagtgactgtgagcacttggtgtggttatttataccttatcgtactatgaatcacctgtgccaagcattgtgctaagggcttcacatgcattattctatttaatcctcatgataatcctattgttatttttcatttgatagataataaactgaggcacagagaggttacgactctagcctatggtcatccaactaacagaacagctgtctaggattggtacccagggagcccagtccttaatgcaaatgtttgcatttttgatgctcctatgtccatctgaatgggtttctcaaatagacttatgattgaaagggagggtaggcactgtgatccttgatccccagagtggaagcagaacagttgccaagagcagataagcaggcaaaatctcaacgtctttggcaaggttcttgttatgtggtagtctctagcctttcctgagtgatgaaaatttagtcggaaaatactctagctaaacctctgccatttctctcttttagaatcctattcttgtgttagtgaggcatggtggcacacacctgtagtcccaggtactcaggaggctgaggcaggaggatcacctgagccccggagattgaggctgcagtgagccaagactgtgccactgtgttccagcctgagcaacagagcaagaccttgtctctcttaaaaaaaaaaaaaaatccattcttgtggccccaaatgaacccagaaacttttgtgtctaattaaagcttggacagcagaatctttaaaatccttcaaccatttgaagcagggcctcaagtcaagctgttgccataaacaacacaaatttggagacccagaatatgctaagaaaaaaaagacaaagtttcctttgctggtggagatgctcaaaagcaaagaaaatttgagatgctcaaaagtaatgcaaagttaaatttggtggagctggcacgtcacctgcacctggataaaaattcaagcagattccataaccttctaggtctttcttagtcaccttatgtatgaatacagtctcaactcagtaattaaaatgtttatataatcattatatgtctctccttcatctttgctgaaaatccgaggagagaaatcacatttagagggtgacacaaaaggtaaaacgatctgtcatgggatttaggttcacttgggtctggaattgccttttaggtaattctagacccaagtgaacctaaatcccatgacagatcgttttatcctttgtgctaccctctaaatatgatttctctccttgggttttcagcagagatgaaggagagacatgtaatgattatataaacattttagttactgagttgagactgtattcagacataagctgactggggcagttatagaatttttgagctgcaaaagaaaacttcaaaattatccagtctaataattttatgatagaagaaaggagacctagagatggaagctgcttcctgcaggtcacaggtctgaagagtggagtggcagactcagaagaggtgattaggtctcacagtgtcagtccactgccagcttctctggctcatgtgcctgaggctggtgggattctgcgcactgggggaagtgtgtgaacaggtcagagggaaacttgaagcctgttcagggccaataaagagagaggtgcagccacagaagaaggagggctgtatgggagaaaagccccagagaagatcaaaaaggtagacgagttgagccctcccagggcaggaagatcaatacttgagaaacgggaaaggttaaaacagggatttgggaatattaatctggtggtgatgtgcaggcctcatttgaggaggaaaattttgaggcaaggaggccgctggggacactattgcagtgggcaggagtgtgccagaagtcctgggttccactcttggcattttcatattttacttcctaatgttgcatgtatgagtgtgtatgtatgtgatggggcagggagaagggacctggggggtaggtctcagcttgaattcaaacttgctgggacatgtctgatgaacacgttgggttgccttccagatgcatgacctctgagccaacttgagtaatttccacatgctctatttccatcctcccttgcccactagcatgctccagctgaagtgagtctgcttataccaggcagtcagatgtacaaggaggctattgatggcacactgcgaaccaagaagcaagtggcaccaatggctccacacccccttcaacccagctcagggtagaatttctcccatctggacaaatggagcagattctgtgctcgtggctcctcttgcaccaaggctcagccgcataattctccgtctctcctgtccaaggcaagctggcagagtctcaagtctcagggcatcctcagaataggccagtggtgttccaccggctgcagaccatgacgaaggcctgaccttgggtagcaatttccccaggcctgtagaagcaggtctgctcctgcctggacacttccctcaaggctgtgacgttgagagtggagatctgtctctcattggcctatctcctcccaatagctgaacatcatcccaggagcggggtctatttataaatggcataactgtttctagctttcgtagcaaagcaatttaacaaatcagtacattctttgaacaactgttacattaaacaagcataactcatgggatgtatttctaaagaaactcaagtttcctctttcattaaccctttaaatttggtggagctggcacgtcacctgcacctggataaaaattcaagcagatcccatgactttctaggtctttcttagtcaccttttgtctgttctcaactcagtgattaaaatgtttatgtaatcgttaagactccaaatatgacataaaattgaggcttctcccctctccttcagttcaggctgggcacttagaggagggggcacttttgtcccccctctctcttcttttaaactgtgatttctgatccttgcagtggaaagaagcaggaaagcttccatgggatttgtcctgctgtgaggatctggcagggaggtttcctatacttggcaagtatttaatggtgacacttttgtgggtggtttcggcccccccccacccccccaattgctggggacctctcaattcaggtgatatgctttcctcaggctctctgcttactccatccacatccctcataatctggccacacctccagcttctcttggctgagatctctttgtccctccaggctactctctcgagtagagttctctgaccacaccagggcagaaccctctctcggtcatggctcacacctttgccccagcaacgctgtgagtacagttacttcccatgtgtaaccctcatgtgtacctcccgtgtgtactctgctgtacctcttgccattttggtttctcaggcttgacacctatgattgagatagggatggggtaggactcgcagcacagctctctccaaagaaattctcatctaaatcttcccctcaactcttttgtacatatatattcttggccacttactttgtaaatcctggtctagcacttcactctggaatttggtatctatttgtgattcagctgaaattcctattttaacatctgattacatttgatttatgacacattttgaactcaaatgcttctattttctgaatgctgagcattaacatgacatttactttttttttcaagcataagataccgtctaccatttggatgtatttcctaggctagggctccgtgcatccaagtctgggttttagcgagagagagggaactctaattaaaaagagagagcaccactgtttggtccaaactctgtaaggccttggggcatccctgtatgatattctgaccctggaggggagagagctgtgtcttcctgttttatagcatctccaggagtgtgagtgtgcaaggacagacttcttcaagagcggattgagacattgctgggaagaggcaagagtcaaaataattcaaaatttgggctgtataggaccttgagcaagtcacttaatccctgtgagcctcagtttccacatctgtagaatgtgaataatcatccctatgttcctcacagatgagatcctgtgaggtcctgtgaagtgcttcctaaattgagaaaggggtcacaagtgtcagcaataggtactaacagttaaatttgatttcatctcctgtcttggactgtgaggaccttgaagtcagggaccatgacttgttttccttccatcccaatgtgagcacaactttttttaaatttttttctttagacagagtcttgctctgttgcccaggctggagtgcaatggtgcaatctcggctcactgcaacctccgcctcccaggttcaagtgattcttctgcctcagcctcccgagtaggtgggactacaggtgcccaccaccatgtctggctaattttggtatttttagtagagacggggtttctccatgttggtcaggctggtctcaaactcctgacctcaagagatctgcccgccttggcctcccaaagtgctgggattacaagagtgagccaccacgcccggctgaacacaattttttgaacgggcttgtgatgctcttgccatgtgtctggaatgttttggggtgtggatttgctatgcagagctacatatttaacttacacatacctccatcaggtcaaatctgaaaaaagtgagttaaggaccagcctcattgcaacctggaaaacccaagccaaagctcctttaataatttatgggattacttagtttcattttccaagatatttttgaaacattgaacccagtacactttgcttctacttttgctgtgattcaaattcttactcctgaaagggctttcttgctttccctcttattatttcaatcatgtcatttgcgtcttcacttgcctctgggttttcagtttgccctgtgaactgcattcctttgctcagacaggggtgtggaggaagcgtgggccaggaacccccagcaacccccagctaatgcacaggagccttaagcttggtgattactacaattgttgcctagtggaacagtgagccattagctgggttctcacccctctattagtattgccctgtgatttaatcacaattagtctcctaggaacatagacataggaaacaggtgggcaaaggaggcagatggcagaaagcaacaacagttggaggattctcattcaaggcactgttttcagaaagtgcagggcgaaggaagagtggagttggagcttggaacaaggcaaatgggtaaatgattaatgagactttgagttttattttctggcattgaggctggggactggcaaatgttgatctcatgtgcggggctgggcttgtttgatatccatagggattgaaagaggtctcagaaggtgattccatttctccttcacttcctctccttggaaactgtggggaggaagttctcagagagggttcttagaggaggttctccattgtttcatctggctttgcaccctggggtccaaatcagtctcttgagtgtatgttgcaatcaacatcccttccgtggccctgctctgaccattctgaggggctcacagaagactcaggcctggagatgaccattctccgtggctatgtatattactgggaagtatagatgagggcggtatatatgtagaagtagaattaattgtgaggtagggaagattggatgagggtgtccttagatcctcccacaggtctgttttcccactcaagcttcaaaacctgggtcccagtgtagaagggaggaacccaagcatttaagcctctcctattacatcactctcctactgtggaactgatccatgaagaaaacagtcaattgtgaaagttcagcccaacccagtccctctttggccatagtcaagttgttaatggcagagacagctgagggcactctggggatgtggtagagagttgaggggaggttggagcagggcagggggtgcaagaagttgggagcccaagcagctgtaagtgaaattaggaaaaactttggaggcctcccatttccctttattctctctacttctcctcttaccagtcaggatccagtcctcctataaatccacgaaagtatttaataactgaatatccttgatatggtttggctgtgtcctcacccaaatctcgaactgtagctcccgtaattcccacgtgtcgtgggagagacccagtgggaggtaactgaatcatgggggcaggtctttcctgtgctgttcttatggtagtgaataagtctcacaagatctgatggttttataaaggtgagttgccctgcacatgctgtctctcttgcctgctgccatgtaagacatgactttgctcctcctttgccttctgctatgactgtgaggcctccctagccgtgtggaactatgagtccattaaacctctttttctttataaattacccagcctcggggatgtctctattagcagcatgagaatagactaatacaatgctcaagggtattaggagagagttctggtattccagaaggttctggaaacccaaggctccttcccccaaaccagaaggcaagacctgggtgcataggagagaggatttctccctcctgactctcttggcatcagattctccacttctcatgataaccatgcagtcccaagttggagactttccaggacagtttcagttttaaatattttatcctattgtcctcataggtacttgtgaggccacatgccctgattttgttatggagaaaacccataagtacaataatcctagctcagagtatttcctgtttggctgagtttacataaatcttgcccttccctggcacctaggcatagtggtatttggaagatttgctggaatcccagctaaggaaaagttagcttgcaagttagtataggagcaaaggatgggtgacctccatgtttcttgggaaatagcttaattctgaagcccccctaaaaagaacttatgcaaaaacccattctcattatgctctgtggctttagagaaaagcttccaggttttcagaattctctctctctcaatagctctctgatgaaaaaaaaatccctttaacaggaaaagaggcctggcacagtggctcatgcctgtaatcccagcattttgggaggccaaggcaggtggatcacctgagctgaggagttcgaggccagcctgggcaatatggtgaaaccccatctctaccaaaaatacaaaaaattagctgggtgttgtggtgtgtgcctgtggttccaactgcttgggaggctgaggtgggaggatcacttgagtctgggagggggaggttgcagtgagccgagattccatctcaaaaaaaaaagaatggagaacagaggcttttttttttttaatgtttaaaaagttagttttttaaaaaaaattattattattatactttaagttttagggtacatgtgcacaatgtgcaggttagttacatatgtataaatgtgccatgctggtgcgctgcacccactaactcgtcatctagcattaggtatatctcccagtgctatccctccccccgtcccccgaccccacaacagtccccagagtgtgatgttccccttcctgtgtccatgtgttgttctcattgttcaattcccacctatgagtgagaatatgcggtgtttggttttttgttctttcgatagtttaggaacagaggcttttaatccatggtgagagatgaaagctaagtcacctcttcctcttggggcattgtttttcacactgaaggtttctggatcctgacctttggcaaaactttaaaactgttatatatatgctagaagaatatataaaatatataatgtaaacatatgtaacataaattaaaatatataatataaattggagactatgtataaatagaatgtgatagaagggaagagaacagaacatatcagaatgcattgcacttggtttgtgtgagtgtggtttcatgaaacttatgtttctgttttatttactgataggtatgtgtgcctttggtcactgtgtaaaatgtattttgtcctgtcgatcacagtttaaaaaatttgaggccactctcctaggaaaggtcatgcagttccctctgttcacactgaactgacactgctaaggcagaccctcccctgagagctggttccataggcgtggagaaaggagttgcaggctgctgagcacctgtgcaggggtgagacaaacattgcagagaggggagaggaaagggccagagtagaagccacttctgtcccttttgcaatagtagctgcaaggcaccgagtgccaacagcacacaaggccttctgccaagtgccttagatgagttgtccgtttcaagtctcaccacacaccataagaaagaggagtactattattactgtcccattttatagatggggaaactgaggcttacttgcctgcggtcacattgcttgtacattgcaaatgaaactttgtcttaaacccaggtgagcccaatttttcaggccatgctctcatgcaatcacagtaaacagttcctctttggggtctggtgttggcccagcatcaccgatcaaggtctgccagcccacacccagagtggattcagggcaggcagggccaggaagtgaaggagcccaagttctgcagcccagggcccccggactgatggctgcgagggtggcagcctgtttccagccctgctcctgctcgctgcctgctttgccatcgcagaatatgctgctaattataaccaaacacaatgagcaatcgcagcctgctggcggtggagcactcgttagaggtctggcaagcttttccttcgactttccccgcagcctgaaggcggtggcggcaggagcccttggctccagctccctcctccccttcccgctccctctgctctgggccgggtccactcaattccattagtatttacttagctcctactgtgtacaggctctgggttcagtgcttgagggtggtgcggagtgggtggaattagagccaggcctctgttcttgccttcagtgagttcaccgtcttcgttttctcttaattagaattttaaaagccaggcgcaatggattgtggcagtgagaagagaggttttgctcagctttgtgtacctgacagtttctttgaggccccttcttgggttttgtgacatttcttttctgccatttgataatgtgagggcacaaaagtgcttgctctgcatacatgatctctggtggtgctcatttgtcccagggagagaaactctttccaaaatcttggagaatgtacacctgggccaatataagagatgcataagacattacaggccttggaacccagagaaggagattctgaaatgcctatgctgagggctcaggaatctgggaagggtgtgaggggaaagacagcctcagatggtgggacatctgcctctggttctggggaaatacacacagctatttctgggttgatcttcagccaaacttcaaagtaagtcagatttatcttttggtcccttcatctctctctcacgcttcctggcatctaaattccttctggtgtatccaagggacattcttcctgccccctattagggcttccttatctgccatcaaccaatcacattaaggtttttttgttgcaaattcatcaagatatgattcctccagggagccatcatggatggtagggatagtcgggtcctgtttactgaggagtccttgatgcctccctagcagaatgactgcccagagcagtagagcatgatagcatggtgcatatttgtggagcgaatgaatgaagagctgggagcaacaccagagaacatctggtcctcattttgctgcgggggaaaaacaatctaaggcccagaagtagggtgaccaactgttccagtgtgccagggactgagagcatttccagcatatgggactttcagttataagaccaagcaaattggtcactttatgatgggttgtgatgaataaaccagtatgagctgtatgagaaggcagggaagaggtgggatttttgtgcacaaaaaagatgggaagcaccagacaggggagagagcaaaggcctggagaaggcaatttttaaaagaaaaatagacagagccaatacatatatgaaaaaaaagttcagactcaccagtaacaaaatacaaactaaagcaattttcacctatttctcaaggatttaacaccatgggaacaccctgagaaaccaagcactttcattcactgctgacagaaatctaaactgtttcagtctttctggtggggaagtttggttccaggttttaaattgtttggtcaccaggcatagataccttatgccctgttttcttagaatttggccttaaggaaataactggagatatgatcaaattttggcaattagggaggccgaggcaggaggattgcttgagcccaggagttcaagaccagcctaggcaacatagtgagaccccctttcttttttctttttctttttttcttttctttttttttttttggagactgagtcttgctttgtcacccaggctggcgtgcagtggcacgatttcagctcactgcaatctctgcctcccaggttcaagtgattctcctgtctcagccccgcaagcagccgggattacaggtgcatgccaccacaccccactgatttttgtagttttagtaaagatgtggtttcaccatgttggccaggctgatcttgaactcctgacctcaggtgatctgcctgccttggcctcccaaagtgctgggattacaggcaggagccactgtgcctggcgagaccccctttctacaaaaataaaaaaattagctgggcatggtagtgtgctcctgtagtctcagctacttggaaggctgaggtgggaggatcacttgagcccaggagatcaaggctgcagtgagacatgatcaagccaccgcatcctgggtaaagacagagtgagaccctgtctcaaaaaaaaagtttggggtgcaaggatgcttatttccttattacagcttcataataaagtcaaattggaggacgagcgcagcggctcatgcttgtaatttcagcacattgagaggccaaggtgggaggatcgttgagcccaggagtttgagaccagcctgggcaatatagtgagacctcatctctacaaaaaatttaaaaattagctgagcgtggtggtacatgcctgtagtcccagctactcaggaggctgaggtgagaggaggcctcgagcccagaaggtcgaggttgcagtgagccgacattgcatcaccatactccagcctgggcaacagaaagagaccctgtctcaaaataaaataaataaagtcaaattggtgtcaacccaaaatttcctcttaggaggctgaatgaacaaaacaaatttcttgctggtctttctggtggtcggcccccacccagtttttaagccaagcaattcaactctccttttgtcccccttccacttcaggtttattccctaagcctatattttagatgccaacaattctctcccacagaggaattttgccattggcccttaagctagtttttctagtcattctcagcttgcatcactcacacggtgcgtaggctgttctgccccttggtgcggttactctggtcagagcatttttggttgtaaataacaaaaccaactcaggctatctcaagaagaataatttttttaaatggtagcagatattgttggatgtggggaagtaagcctcaaaggaggcccacctaaaatacctctggactggctgctcctcaatagactggcttctttctcatttgacccaatactgagttttagtctctgactctggcccttactatgtgcccataggcaagtgacataagtgtggcttcatctgtaacaaggggatattactagcttttatcacataga[140 bp omitted]atgaaaccccatctctactaaaaatacaaaaattagccaggcgtggtggtgcacacctgtagtcttagctacttgggaggctgaggcaggagaatcacttgaaccctggaggtggagattgcagtgagccgagatcacaccaccacactccagcctgggcgaccgggtgagactcagtctcaaaaaaacaaaaaaacaaaatttggttttcatgcccagttcctgatacagagctcctagaacccttggaatttccagagtgattttttgttattgataaggagcctctttaaaccacacctgagtttatgctcatgagatggcccaggatggggtccctagagagcttcaagatgggggctgaccaccagaaagaccacgattagagggaagagggtaggaactttcagcctcactctccccaccacccccaattcctggaggcggaggagggctggagattgggtcagaaaatcttttgaacaaagaaattcaaagagttccaaggttggtgaatgcagaagacagaggcttctatactcggcatccattcagatcttgccctgtgtagctctttatctggctgtttatttgtatcctttataataaaccaataaatgcaagttgtcctaataaattactgaacctcttcgggggtggtgtggggatgcctaaatttgtagtcatctgggcagaagtgtgggtagcttgttatttgcagctggcactggaagtggggggattgatccctttaacttgtgggaactgatgctaactcccggtagtgtcagaactgaattgaattgaattgctggacacccagttgatgttggagagttggttggtgtcagaaaacaccccacacaggcactgtcttagcactaagtattagctcagttggtccttttaacagccctatgagatacatgctattaccatctgccatgcacatgcatttgtgtgtgtgtgtgcatacgcatgcactcagatcctctgcttctcctcctaacttggttgtgcatatggctccttaatagccaacccagtagtaactcccaccccctcaattaaaacctggactgtccctttgtgtctcactggctgtcaggctctgtcctgctactgctccctgtggcaatcatctactctctccccatcactcccccatttgtgaaagacatgagcacctggctcactatcagtctgttcatcaccatactcagcatcattcctggtccgtgtctattagatgacccctccaacattctgcctccagttaattaatcttctcaccaccagtgacctgtccctccctgcctgcctcagctgcccactcccatcatctaatgctagatcttatcaccagcagtaactgtgccatgtccaagatctccatttcaagcagctttctctgaccactacctcatatctgttcaacttgcttcccttgtacacccactcctacactcttcccctcagagaacttccttccacacactggttccccagtcctttcactcacgcattcctccatgctgtcacctccctcacttctcagcttataatccatggtccagcatgataaatatacttacataaaccctggggccttgtagtgacattaaaatatgtctgcaagttctttgatgcttgtactcatcagcttggctgccataacgaaatgctatagagtgggtggcttgagcatggattttttttttctcacagctctggagactagtagtctaagaccaagattctgtccaatttggtttctggtgaagactcttcctgaattgtagatggctactttcttgctgtgtcctcacgtggccgttccttggtgtgtgagcacagagagagagacagcaagctatttggtgtctcttcttaaaaggagatgaattctattggatcagagctttatgatcttatttaacattatgatcttatttaacattaatttgtttcttagaggccccatctccaaatagagccatactatgggttagggctccaacacgggaatttgtggcgggggcagacataaacattcagtccataacaacactactccctccaaaaggtggagtctaattcccctccccttgaatgtggactggacttagtgacttgcttttaacaaatataatgcagcaaaaggaacgcaatgtcacttctgagcataggtcaaagaaggatagcttctgattaggtctccctcttggactggtagctctgggagaagctggttgtcaggctgtaagtacactctgacagcctgtagaggaactgagttgtccaccaaccaccactactgacttgccagccatgtgagtgcaccaccctggaagcagatcctccagccctatacaagcttttagatgactgtaacctgaggtaacatttgactgcagcctcgtgaaagaccccaagccagaactgcccagcctgagctgcttccaaattccaaactgtgacccacagaaactatgaggtaataaatatttgttgtttgggagtaattgtgttggagtcatgtgtttcacagcaatagataacaatgacaaccattctgaccttctctctcccaacctataggcctagcaaaatcaacacttgtcaaatgtgacttttagctatttaatgcctgcactccaggtgttaaaggtggctggagaaaaacacagagctgtactgaaaggtttccctttaaattcatcaccactgacctcagaggaccacattgctgccatattgctgcccagcaatcctacactgttttccccaggcaagtcgcctctcctactccctctggcagatgactgcatcacgcctcctttcttttcaggcctgcacgcagttctccttgcttctcactttcagctgatgacatcatttttcccccactgaaaaaaaaaatcagaaaagaaaaaaaaatcacatcctcccacaaccaaaaataccagcctccagaagttgtgcccacgtgccccacctttcctcctctcatgatgaatgaatcgtccatgtgtctgtctgaggccagcccctcctctcgcacactggatcccttcttctcttgcttgttaaaaagcatcactccagcaattatccactctctcatctgcagcatcaaattttccatctcaactggatcattcccatcagcatactgataggatataataactctcagctttaaaaaatatccttgaccccacattccctccagttgcttcaccatttgctaaccattcagagcaaaactactgtttctatttcctcacctcctagtctccgtcacaggctccaatcagcctttcatccttaccatggcagtgaaactacatttatcaaggccactgatgacttctgtgttgacagattccatggtcaattctctgttcttatttgacccatcggtggcattttaagtcatgtgatcactcctttcttcttgaaacactttcttcagttgcttccaggacaccagggtcttccaatcttcctctgacttcactagctgttccttctccatttgtcttttttagattttctttttcacttttcacaacctgtaaaattggaatggcctagaccttagctcttgaatagcctctgttctcttctctttcctttccttatgctccctcttctgggtggccttatgtggtcccaaggctttaaacaccatcaacatgctatagacctcctatttatgtccctaatctagagcatctcccttgagcccaggatgaataaaggcaaaatttgtgttcattttcctccctttttggcacatctctcctcacctctcagtggttttcctttcttctgatatccagtttattcatactcaagggtaatagataggattaaaacattacctactgcttagcacactgcctcacacataatggaaatattaatcaaatgtaactaaattactcctttcagggaacaatatttatatttggcctaaaggcaaagttacgcctttctacttgtgaaatttcagatatgggcatagatggtttaatcctactcaggcctgggatggaaatggggggatggggtgtgggtttttgagggtgataggcttttctagaattgcttaaatcaagctgatcacagactcagcctttctgtagggtgtacttagtgttttctctaccttttttggtgttgttatggccaagatgaaatagaatgcctgggtcgcttggcaaagccccaccctgagttttagtggtggctgcctggtggtgttagtccagtggttagaccacagtagtgacaggctgcagattcattttccacttagcttttcacagagagaccctgttcttcagccactgattgatcccttaacttggtcaaaaattggcacatagtccagcctaaagattcaaagttagaccttgacatttggctgaatcattttaaaaagtttcaaaggtcagaacgtccataaataagagtacagtccttctcccatgccctctctagtttaccatgataaagtgagagtcaatgaggtgacaaagctgtggaagtcctggggcactggatcagtcaaggtcctgtcactcaaggcagtgaggcgggttggacaaaggggcgatttatagggccaagggaagcaacattgggcagggaggcacccagggccagcaacaacagggagtcactaccgcctctaggctgaaggtgtaggtggggagcactgaccagattccagggacagccacggctgttggagagctgcctgtgaccggagccttggccacccatcagcccagcaggatgggagatgacagaatgaacatcttgactttctcttcgtcctttccatctcttataaatgcttcccattggccaaacccaactaggaaccagatggcaagggagcctattggtatagaccacataaggcaacctcttggatctcggagcagagtggagaagtctggagagtgcagctgaaggagccaacagtgaatatcccacagacttgttcagaattacaactccagggtccaaacctattagaaggcaatgttctcaaggtagatggttcatggacccctgtctccaccagcaaaaacaactaaagccgatgttctatgcttcaagatggggtactagaataaccctcatgtatatgagactggaagtctgctccctaatgatgctgattagggagcatcaataaatcttgtgacagggacaagatttattgaagtgtgagtattctaaggaacattttagcttgataatctcatatctggatcttctgggtacagttttttttgttttttttttttttgagatggagtcttgctctgtcactcgggctggagtgtagtggcgtgatcttggctccacctcccaggttcaagtgattctcctgcctcagcctcccaagtagctgggattacaggcacgtgccaccatgcctggctaattttttttttttttttttttgagatggagtcttgttccatctccaggctgaatctcggctcattgcaacctccaactcccgggttcaagcgattatcctccctcagccttctgagcagctaggattacaggcacacaccaccatacccagctaatttttgtatttttagtagagatggggtttcgccatgttggccaggatggtcttgatctcctggccttgtgatccacccacctcggcctcccaaagtgctggaattacccacgtgagccaccaagcccagcctaattttggtatttttagtagagatggggtttcaccatgttgcccaggctggtctcgaactcctgacctcaagcgatcctcctgccttgggtcctcccaaagtgctaggattacaggcgtgagccactgcacctggcctggggtacagaattgggagaatgatgggaagaaagactgggagaagagggaaggacctgacacaagaggtaaagtcagcctacataataaacagctcagaaggagggggatatttaggtgctggacagagtacaagagcttcaggcatgtcaaaagcccttaagcagctggccgtgagagaattaaggaaaaagtggctttagaaaaacattgccaagtgtttctatctcttcaaaagatacaacaaatacttggaatttcttttaaaatttctttcagttgctgaactatgttcctttctctatgagcctccaagcagagtctgggccatgtgggccctcaactgttattggagtcacaataaaagaccttctggatggttctggcaaccaaggactggccagaaagcactccacacacctcatcctctgtcctctgcatgatagcacacaagcctggaagcttctgaggacttagcttccttccaaggggttgtaaccttacccaatgattgctgcaaaatggaagggatgattattttacctttggcacagaagccagagcaggtaaacaagttgttagtcactcaataagtcatctacagatgcaaggagacacaacccaggtctctggactctgtgtggcctgcattctgctcagctggctggctgcaaattctatttccttccctttctaggaaatgaaaattctcccctctccttcctgagaaggctcaggcctgcttggtttaggttttcaccaagggactgtgggacaagaccagattctgagcctttacaaaatcattcctttagttcttagttcctttcttgaaagcagtttaaagtgtgcaggggcaggagactaagccctaggactaggacttgggggttctgagcatgggtgcatgactataacatgatctgaatttcccagctatgcagcatactctgtcagatgtgggctctgatccggatgagatattgctcaatctgggctaataagatatggggagacattgactgaggggttctggaaagaagtttctactttcttccatgatgactatttaaaaagcagcttgctgtctctcctgagagtgaacaaagttgcagacagctttggttgctgctggcaaccacattgcaacctagaggattgagagttttaggatgaagttgacatcatggaagacagagtggaaagacaaaaagaaacagcatagagcagatggatcagatcttgcataaagcccaccctacctcaaacttctttttaattgtaaaggaccaataggttgattgtttaagccagtttgagttgtgctttctgctactgcagtaaaaaccatccattatactgatacattatggcagctcagattctccacgctgtaggctcaggaacaggaaggcacagtctggtctgagaagattctgtcctgatgcaggtaatgtgttgctctttctttggtgggtggcagaaaggtcaggcaagttcatcttgcagcttggggagaagaagtgatgaattaggtcatctggcaaaggcatggctgaaaggatgcctcacgtacttgaacatgatgctctgggggcttagagggcttgggctgccagatccatgtgggcaggtgttctttgcctgaggttcttgaactcctagggttccatggaagagtgtcaggaagtccatgaaaccctgaaaccgtatgaagaattttgtatgtgtgcattttcatcaggttttcaaaatggaagaattactgccctatgtttaaatggtatatgaccctctaaacccatctgcctccatttctccttgtcatcagacaggatgactagtcctttttcttcttactttccagaagggatgaacatatgaaagatcttagagggtggataaacctattagatggaaaacatcttttttaaattatcagacagagccaagctatgaggagaggacttcaggggtgtcctgaagtgagaaagtccatctgaaactgaagacagccaggagcatagatgaagaagaatgacaaaagtcagacatgtcctttctgtaggaaatccaggtacttggatacacatgaacatatacgctgcatgtcatgtatgtatatggaataacaacgtttgcattgtctgatggtttccaacaagtattttcataacattgcctcatttggtcttcatacagacaatgggagctgggtctcacacttttccccaaggttcaggaggtgaagtgccttcttcaccatctctccgtaaatggtgatgctgtaaatgaaattcacgtattctgtttccttacctggtgcactaagccctatattagtctaaacctggctgaccatcagtatcacctggctgcttctttaaaatgcttgggctccacaccagttctagaaattctgattcaggatgtctaggacagggcctgggtatttgcatttctggaagcaccccaagtgaaactgaagactatttaggtttttagaatttggcccttgcaggggttggtgcattgatacagtggactcttaaaagatgggcagctgggtatggtggctcacacctgtaatttcagcattttgggaggccaaggtgggaggatagcttgagcccagcagttcaagaccagccacggcaacataaggagacctcgtctctacagaaaattaaaaaaaaaaaaaaattagccagggtggcacacagctgtggcccagctacccaggaggctgaggtgggaggatcgcttgagcctgggagatcgaggttgcagtaagcagagactgtgccactgcactccagcctgggtgacagagcaagactctgtttccaaaaaaaaaaggcaaaagtagcaaatctctagtggtggaatttcaggctttgaggcagacaaatggatgcaggatatattttggggaagggagacatcttgttatgatgtgtggtagctgtgtatttgccacatggctctccaccacagaacttcccacatgaatattacctgcttggtgtatactatacacatataatgtcaacaaaactctcagaatgaagagcaaacacatctaataaacatgtggatttttagagcatgcaagcttttttagggaaaaaaatatggaagcattttcagtgtcaagtctcaccacgaggcaggctcttcaagctggaagaaaggcatccggaaatacgagtttgtcatggaaacgctgatggggcttcagctgagtgatgctcacaggtgcaacccagaatggcacagcctcttgtggcttatttacatcccagcctgctgaacgagctcacttttcttgttgcctggccctgggggcttcttaccaggaagaactgtggctgtggctgtgtttcttggtggagattttcagcaggaaattacagggggtcttaggatcagtttcacatctgggagaaaggctcctggagagagtggagagatgaatgaagtaaagaaggaagaaaaggagggaaggaaggaaaacatactgattctaagtgccaggacctacccaaggagaacacaggcatcatcttcatgtcttcatcaccatcggctgtaacccagtgaggtacctaaggttatccctgtgttacagagaaggaaacaggctggcggcacccagaggggagctgacaaccacatccttgggtagactagatggccagcggtgcaaggattgggaagcttcccctgaaaccaccactttggctgacaccaaaaaccctagagcagggaacaaaggccttctcttgacaagcagggagaaacctagagaggccattcctcctgggagagctgcatgctgactcccctgggtcctgtcagggtggatgactgaccacgaccctgtgctgcgggcaggctatggtccaggagggacactgggtccttgaagatacaggttctctgttcttcccagctgggctccaggagtcacatcaggagccagagaagggcatcagttgctttatggagccaataggtggggcctaagaggctgggggagggagttgggaataggaaaaggttgtctgcctgcgggacgtttccatttggcagagaaagtgtggtcccttaggggctctcaatccaatccgacaggagagacaagagctctgcacacatggagtccaagaaagatggaggaaagaagacacaggccagagattctaggagctcacagactggacagggaaagacctgtttttcccgatcctggccacagacccagaggtcccaaccatcttgggaactgccctggactctggcaagagttagggtgagacccagaccccccaagttctctcctacacatctacaaggcccccagagtgttcttctacaatgctttctatcagagccacctgctcctgggggcttgcagctttggccaggaccagtgagtggctctgctgggaggctgctctaattaggcccagggtcactccccagccccatctgtcctcagcaacatgagtcccaccttttcctcctcaccaggagccttgggagcttgggagacattccaaggctggctctgacatgaatttgctgcacagtgcgccaggcgatcagagctgactcctctcccttttcccttggaggtgttgatagtaacagcagcgatgagctgccaagttggcaggagaacagagcgactgtgcactgcggatggaggggggcgggaagcagcaagccggcagagggctgggccagaacgacagtttgtttatcctgaaattgaaagggtccctccagtctcagccaccagcatcttgcaggagggagggtgacttcctagaaggtggaggctctggtgggaggcccagggttggtgatgtgggtgttgctagagtcgggtgggtggaagggatcttttggttgggcctgaagccatcagccagcctggccccagaggcaggacagagacccacctttgttcctgctgttgaggtggctgtggagtttctaaactggaatggacctggggtggggagctagagttctgaagctgcttcctcctaaatatagagacctcaaggggcatttaggagggtactcatgctctgtcaatcaaacgaacctgggaccttgggcaagtatttgaatcctttgagcctcggagattaagaacatttactttaaagctttgtgtgaggattcaataaagtagtgacggcaaaaatttgtttcctgtttactccagggcagacatggtgctaaaagctttctgtttgtgaagcatttaatcctcaaactttatcaggtgggtactatttgtattcctattttatgaatgaagtaactgaggcacagagggggtaagcagcttactcagtgtcacagagctaatgagtagccacaatggggatttgaacctagtggtgtgttgcttaggcctatgttctcagcccctgtagaaactgtcttcacagtgcaactgagttctgagcagggtgcctggcacagagcaaacatttaatgaatgttagctactatcatgactcccctagagcagttccagacaggggacctaggctcctgatatctataccagggactccctggggtcctaggttgtcctctttccatcttttgtctatactatcttgctcatcctaggagctggaggaacttctcttttggagagattgctgctggtcttccctgcttctctcatcccctcctcccgaaggcagagcagaggaattctcggcttcttccagttaccctcagcctgcaaagaaaacatagtctgctgcgtctgctgccagttcctctctggcgacagccacaacccatttgctcagcatcagccccagcctgtgctgtgggtagagcccggagcctggggcaggaccccagtgccctgtgtgagagcctgggtcagttactgtaaggctgggccttgggggccactcagagggagaggcatggcccacataatttcttgaagactctggctgtaagagtggtgactgaaggctggtgtgctgtatgcatagactctttcttttttttttttttttaggcggagtccctctctctgtcaccaggctggagtgcagtggcacgatcttgactcactccaacctccacctcccaggttcacgccattctcctgcctcagcctcccaagtagctgggactataggcgtccgccaccgcacccagctaatttttgtatttttagtagagatggggttttacca[136 bp omitted]catgttctcagttttggaaggttcattaatacagccatgcaaattggtaaccagctttacaagctcactaaactgtgctactggccaccctaaggtgccagacaaagaatcctgtgccactttctgcgtggccagagctacctcctgtcagctgcgagatagccaaaccacagccaggagcccagattactgactgctccctaggcccgaattcttccctgggacgatgaaacatcaggcatttgtgtgggggaaaggaactgcagtgtggacatctcagaacaacactgttttgtttatgtaagctgtgaggcattgtgggtgtgctggctacagagtcacccccctgtttccatcacatacgagaactgatgacaggagatcaggtagcgttgggaagctggggctaaaactctgctatggactcagaagaaaatggaatattctaaatattatagaatagacacagcaaggatacagtatcttctagttagaaacttttaattaaaagaatgttcactccatagggatcagctagaacatgatggtcaataattataaacagctgagcatggtggtgtgcacctgtaatctcaactactagggaggctgaggcaggaggatcacatgaggccaggaggtcaaagctgcagtatgccacgattgtgcctgtgaatagccactgtatgccggcctgggcaacataacaagaccccatctctaaattttttttttaattatgaacaaaaaggacagtcacaacccaacaattcctttacgatgctcactacacaagcagcacttaagactccttaggcatgggagtactctctgcctgggccagggaggtggaaaggaaactgaggcaccaaagtagaagagaggtcctgagatgtttcaaggcacacatagaaggtagttgcccgtcaccacacagggctgatcaccatcttggtctctgggatctaaaatattcaacttgggtagtagttcattcttgtaaacccagcactctgggaggccaaggtgggagaatcgcttgagcccatgagttcaaaactggcctgggcaacatagcaagatctcatctctactaaaaataaaaaataaataaagttagccaggcatcatggcggcacatacgtgtaatcccagccactcagctgaagcaggaagatcccttgagcccaggagtttgaggctacagtgagctgtgatcgtgctatggaccccaatttgggcaacagagtgagaccctgtctcaaaaaaaaaaaaaattcaacttggtttgttggagatttgctttttccagtgttgtaacagaagtcagaaagagaaaagaatgccttacagtcaactcgctggcacacacctgttctgtaaagtaagttacaagggtcttagtttactctgcccagaaatgcatttattctatggactttgaggggctcattcacaatacatgacaaatcgtctgaggggtgggtgtagtgggagactctctcgaggagtggagaacaactgtctgcttcccgctgctggttcaatttggtgccaagcagcagtcagaagaaaggcatgaaaccaggcaaggtgaggagcaaaaagccggagctgaaagcagagggcagagttgaccatgaatgagaaaattaaggtcaaggcaagagctacagggtgtggacacctgcctacctgcctgcctgtgagagaaccccatgggactgggtgtcaggaagagggcatgctccctagcacttgacctcctgggatagggcacagcgcagaggcagggggatgcccggatgacctgtgagagagttctttccctctggaggccttgggaggaagccagaatgggcatgcagaagtgggtcaaggttcaattttcctgaagaagccctgagctggagacaggatgcattgactttttatttatttatgaggctatcgattataatgcagcttttccacaggatcctgaggcagctcgagttgggagaagaaacctcctaccagttcactttctctgtcctggagatgtcaggtgttcagataggctgcctccctccctccctggtggttctctctcctctccctacccctctgcagccctcacctctgcacaccctgaaggatggaggctccagagagttcctctagtctctcgggtctggctgttccgggttctttccaatatttagggcatattccaataccccaaatcctgagagcacaggctatgtgctccacatgagtggatgaaagatttctcagttataaaaggcctctgagatcttcctagcaaaacacctttttactgagaaggaacagaggccaaggagaagtgatttcttccaagtcacacaaggtgagaggcacaacctggacaagaatgaggcctctcgattcccccaggcgacaatcctttccactctagcacgctgcctcccaacaggatcccttttacttgaagtgaacccccagacagatccttaatgcccactcttccccctcagtccagggttggggtgcccctgagctgggaatcactctcgggagcccttgctctctttggcattcccccagcaggcctctccttattttgttttgcacttgatgacatctttgctctcagtcttccccactcccaaagaggatcgaggaggttctgctaactgcagagcaaaacagggggtcgtgataatgaccacaggcctgatcagcctcgcctggcctctccctctggcctccccatgggccacctttcctgaggcctcttccagtctttgagccccaacactagccttctggtgagcagagatgccatgtccactagttcctgtgaacagaaatggctcttctctcttggccctgattgcagagctcagtctcctggcagaggcaggaagaggcctgcccagatggacagaatctaggatgctggccaacactgcaccattccccgaaggctgcctccccaactttggagaccctgaatcttggcctaattggatatggctctaaagatgagggccattgcttagggctgggctggctcttggccctatcaagattgtctctgtcagatgcagggccatgcacctgtagtcccagctactcaggaggctgaggtggaaagatcatttgagcctaggagtttaaggccagcccaggcaatatagcaagaccacatctctttaaaaaaaaaaaaagactaacacaaaaacaaaagattgcctatgtccctctacctctccttaagttcattttgccattcgttgttccagggtttaaccccagcccaacttactgtctttatttcatatttcttcccttcctacaggctatgctatagccaaaaggaatttcatacaagcactgcattttcttcctttattcctattgttctataatgtcctaccttcttgctccacacaagtcgaaaactcatgttataagctaccttccctgagtatagcagctgatgtttgttgagcatctactatatgccaggcactgcaccttttcctcacagtgacctcaaaattctcccaatgtatcctagggttatacaatgagtagcaaagtcaagatttgaaccctggcctgtgttcttcagagtccatactcacagccgctacaccatattgcctctcaggaaacaggtgtccttccctacattacctttctctgacttaggatttgattagcacgtcccttaccacacatcactttttgatttttactgtaactacttaaatcatatcccttagtttccttattagaccacgagctcttcaaaagtaagggctgggtgacatttggtgtccccaccaccaggcccagcgctagcacagacaggtttaattaactgcatttcaaatgaaggaatgaacacatgactgagtgaatctgaattgtagtgagggttaaagtctgtccatggtggaatagggagctggaacttgcttttctgaaggcctcagcctcacgccgccttttaaaaggcaccatgggaaaggaggagaatggaagagtttcatagatgagtgagagcaggagcacaaacccctgcatgtctgtaattacagagcctcttgatgctggctgctgttggcagcatgctggggaacgtgttttcagtcctccaggttgggaactgctggtactactgattgctttgtgtgatctgacatggctgtgaaaggaaaagaaagaaggggataataaaacctccgagcagtggccttgccagctgtagggcctgctccaagagcaagggcctccagtgtgcaccccaccactgagactcgcttttggtagggcagaggggaatctagccaccttgtctgtgctggacccttttgggagcaggatctccacatggagcagcccagggcagggtggtctccggctgggttaagggcagtgtcaattcaccgggaaaccttccaatttgggaagaggttgcaggaggtggtaaggtgtaaagttctggggagaggacctgaagtgtgggcctcatctgcaaaggaggtgtgtgtgtgtgtgtctgtgttcacgcttgcttgagttaagggagggtgcccaaaatgggactgtgctccgtcctttcagggccctgaggttccctggtgggtctattttctccaagggtctgttcaagatttggcttttctgggcaggtttagaacaggcagatctggctcctgagccgtggctaggaggatggggctctgccttgatatgaatccacctttgtggagagaaagtgcactctcacccaccattcccagcctcctttccacaactgcctgttcacctcctgcccaaaccaaacaacagcctcaaaacacttgccttcacatgacttcacttgacttttactctgatacttgtattttcagagcccatttacacccatttgcctgcttccattcttataacaggccctccaggggtacagaaagcaaagattctttttattataggtgagaaactgaagcccagagaggctgtgtaacttgtttcaggtcacgcagcaaattagcaatggagccccagggttcactgctctggcttcatgactccaagttcttttccttcttcagttctaggtccctacccacctgtctcctgaaaggaaatcttcacagagaagctcacgcttcattagtaacatgcacatcaattctcctggttctgggtcaaaagcaactcaaaactggcaccctccttactctttcctccttatctccttcctccatttctacccacctccaccccactcttaagatgctcatctccagcaagaatcctcaatatggctcttgctgaaaatgtggggtaaacgccagggtgctttcctgggaggagagccagtgctgtttgtccttcctaggaaggaggaaaagacagcggtggcctgggtcccaataaatggcctgtccaggcctggagaggggctgaagacagggtgatgtgtaaggaaactcagggatatgatttaaatagttacagggtgatgtcttacaagtttcccttttcctcacacctcccagactggtaacctaatggtcactggatggccacctctttaagactaagaagtcatctagcctggctctaccctccatttgaaactttgtctacatttgggatgttatgcattgattcattcatttattcagcaaatacttgttaacggctgactatgcaccaacgtttgctgtaggtgctgtcgacaccacagtgaacgtgacaggcaagattccaaacagtctgagaaaagaacattgttctttggcatactgtttttggcggtgaggtggggtgggcaggatagagaagtaatgggagctcagagaagcaggatagctgagaaggcctctcagggaagacatttgtctacgctgaagctagaaagatgagcagacctttaagcaggcgaagaggggcaagagtgttccaggcacagtgaacagcatgtgtgcagacccagaggctacagacccatagtacactgaaggaactgaaagaagcacacatgacctgagtgtagcatgcaagcggcagatgaggggaagagggggtaagaaatgaggctggatggtggggcagggactgggtcaagaagggcttgaaaaccatgttgagtagaataaactttatcctacagacaataagccactgaaagcttttaagaagatatgtgacatgttcagatgcatgttttagaaagagatttttttgcttttgtgtggattgacaattttcaatagaaatataatgagagccacaaatgggagccacatatgtaattaaaatgtttctagtagccacataaacaatgtaaaaagaaacaagtgaaattaattttaaataaattaattcaacatataaatatactatgattttaacatataatcaacatagaaatactaagatattttactttcttcatattaagtctatgaaatctggtgtgtattttacacttatagcacttttttttttttttttgagatggagtctcgctctgtcgcccaggctggggtgcagtggcgcgatcttggctcactgcaagctccgcctcctgggttcacgccattctcttacctca[135 bp omitted]gcctcccaaagtgctgggattataggcgtgagccaccgcgcccagccacttgtagcacattttgaattggcctagctaccttttgagtgctccaggccacatgcagttagagactatcatattggacaatgcagatgtagagaatgcatttgacgaagcaagaatgggtgttaggagacgagggatgaaactgttgcaattgacctggaagatcatgatgacttgaggctagagacaggtttcagagatatgactcccagatttctgtcttgggcagccagctggatgctagggccatgatgagatggagaagtcagaaagaggtttgggggtgagtggatgtggaagggttgaaagtggttgaaagtgaggagttccgttttggacatgttgcattggaggtatttgtggggcatctgcggaatttgtttgatagtttttcttcactccaatttttctgactgggtacatggtcactcagaataaaaaccatgtgtggacctctaagttctggccagagggatataggcacatgtattgtgaatcctgtctgggaagtgtcttggaagagaaagagcatgctctgtcacagctttctccttcctgctagaggctgagtggccatcctggatcagttgagggttgagggtggcagaattataggtagaagaatcctgagaccctgacactgtggatccgtcacaccaggcctggatttaatacctctgcacttctatcttgtttgagccattttatttgggatttccttttattcacaggaaagggattctaatgaatatagcacttaaatggagatgttcacagggcagttggatcttatgggtctaaagctaaggagaggggtctggacaggatatatatagatttgggaattaccagtctatagttggtcattgaagccatagcaacatataagatctccaaggaagaatggtctagtgagaagagaaaaggatctagaacaaaactctgaggaacaccaacatttaaagaatgagcagaggaagaggagcctgctaaggagacaaaaggtgtagccagagtggtaggaagaaaaccagggaagtgctacgctatggaaggctagggaggagagagtcccaaggagggactggtcaacagaaagcagccatctctgcttgctgctatgagtgtgacagggtctgaaaaaaacaacttagggttctgttgctgtcccaaatcccaacagactagtcatgtcatccttctgctcataacccttcagtggattcttagttttttcaggatgaagttctagctccttcgcagatcctttgggtccctccaaagtctagccctaactcttctgtccagcctgttcctttcccccgtacactgtgtccctgccagacttggcttcccaccattccctgccttggctcatgattttttccaaaattctacccactcttcaagacttacctcaaatgctaacccctctgttccctcattcttccatacagattaattacccctaacccatgttcccagagcattttgctcactcttagtcgcaaccaccactgtactctgacctgtgctaataaaattgattgtacatatgtgtgtctccccattgacactgtgggtctgagcagtcatagctgcttctagctgttcatctccatctccctcggtgcctcctgcagagcttgttagagatgtttcagaaatgtctatggatttaatggaactattgtcctcccacagaccccaagtaatagtgtgatctctgttttctttgtcatagtattccaggggtagaaatgataggggagacactaatatagagaaccctggtatggaggaaaacagacatgttgagtttgaatcctgctgctcaaagaaattgtcctagtctgtgtttccctgactcaagtagcttgtatcaagaaccaccttaataatagaaaagcaatagaaaaaaaaatgaaactaaaaattggttctttgaagagatgaacaaaattgacaaatctttagctagactgaccaaagcaagaaaaagagagacagagagagagagaaggaggtgagaaaaagagagagactcaagttactaaaacactaaaattaggaatgaaagagggaacattattaccaaccttaaagaaataaaaacgtgcagccataaaaaagaacaagatcacgtcttttgcaggaacatggatggaggctatcatccttagcaaactaatgcagggacagaaaaccaaatactgtgtgttctcacttataactgggagctaaatgatgagaacttatgaacacaaaaaaggaaacgacaaacactggggtctacttgatggaggagggtgggaggagggagaggagcagaaaagagaactattgattactgagcttaatacctgggtgatgtacaacaaactcctgtgacacgtgtttctctatgtaacaaaccttcgcatgtattcctgaacctaaaatacaaacttaaaaaaagaagtaaaagagattttaaggagatactatgaacaaagtggatagcctagataaaacacacacatttttagaaagacacagactactaaaactctctcaagaaacaggtaatctgaataggacaagaaaagagattgcactatactatcgcaaaaacttcccacacagaaaattccaggccctgatggcttcactggtgaattctactaaatgtttaaagaattaaaatcagtcctttatactctttcaaaaatggaatagtaacactttccaacttatttcatgagttcagtattacccagataccaaaaccagaagacatcgtaagaaaactatcagctgggcacagtggctcatgcctataatcccagcactttgggaggccaaggtgggtggtcaggagttcgggaccagcctggccaacatggggaaaccctgtctctactaaaaatacaaaaattagctgggccttgtggcaggcgcctgtaatcccacctactctgaggctgaggcaggagagttgcttgaacctgggaggcggacattgcagtgagccgagattgtgccattgcactccagcctgggcgacaagagagaaattccatctcaaaaacaaacaaacaaacaaacaaacaaacaaaacccatcaatatcacttataaatatagatgcaaaaatcttcaacaaaatactaacaaaatgaacatggcaacatataaaaaggattatacatcatgaccaagtgggatttatcccaggaatgcaagattggcttaacatttgaaaatcactcaataggccaggtgcagtggctcacacctgtaatcccagcactttgggaagccaaggtgggagaatagcttgagtccaggagttcaagaccagcctaagcaacatagtgagacgctgtctttacaaaaaaaaaaaatttttttaaattagccaggtgtcattgcatgtgcctatggtctcaggtgcttgggaagctgaggtgagaggatcactgaatcttgggaggtcaagtctgcagtgagccatgatcacactactgggtggcacagtaagaccctttcaaaaaaagtaaaaaataagtagaaagaaaaaagaaaatctatcaatgtaatacaccatactaataataaaggacaaaagccacatgatcatgtcaatagatgcagaacaagcatttgacaatttgataaagtttcatgataaaaacactcaacaaactagggatgggagtgaacttccttaacttgataaaagcacctacaaacctcccacatctaacattaatggtgaaagactgaaagcttttcccctaagatagggaagaagtcaaggatgactgctctcactaaccctactgaataatatactgaaggttctatctaggacaattaggcaagaaaaatgaataaaagacacccagattttaaaggaagaagtaaaactatcgtagatgacatgattttgcatacagaaaatgctaagaaacacacacatacacattgtttttttttttttttttttattgatcattcttgggtgtttctcgcagagggggatttggcagggtcacaggacaatagtggagggaaggtcagcagataaacaagtgaacaaaggtctctggttttcctaggcagaggaccctgcggccttccgcagcgtttgtgtccctgggtacttgagattagggagtggtgatgactcttaacgagcatgctgacttcaagcgtctgtttaacaaagcacatcttgcaccgcccttaatccatttaaccctgagtggacacagcacatgtttcagagagcacagggttgggggtaaggtcacagatcaacaggatcccaaggcagaagaatttttcttagtacagaacaaaatgaaaagtctcccatgtctacttctttctacacagacacggcaaccatccgatttctcaatcttttccccacctttcccccctttctattccacaaaaccgccattgtcatcatggcccgttctcaatgagctgttgggtacacctcccagaccgggtggtggccgggcagaggcgcccctcacctcccggacggggcggctggccgggcggggggctgacccccccacctccctcccggacggggcggctggccgggcagcggggctcctcacttcccagtaggggcggccgggcagaggcgcccctcacctcccggacggggcggctggccgggcagggggctgaccccccccacctccctcccggacggggcggctggccgggcggggggctgaccccaccacctccctcccggacggggcggctggccgggcagaggggctcctcacttcccagtaggggcagccgggcagaggtgcccctcacctcccggacggggcggctggccaggcggggggctgacccccccacctccctcccggacggggcggctggccgggtgggggggctgacccccccacctccctcccggtcggggcggccggccaggcagaggggctcctcacttcccagtaggggcggccgggcagaggcgcccctcacctcccggagggggcggctggccgggcggggggctgatccccccacctccctcctggagggggcggctggccaggaggggggctgacccccccccacctccctcccggacggggtggctgccgggcggagacgctcctcacttcccagatggggtggctgccgggcggaggggctcctcacttctcagacggggcggctgctgggcggaggggctcctcacttctcagacagggcggttgctaggcagagggtctcctcacttctcagacggggcggccgggcagagatgctcctcacatcccggacggggcgacagggcagaggcgctccccacatctcagaggatgggcggccgggcagagacgctcctcacttcctagatgggatggcggccgggaagaggcgctcctcactttccagactgggcagccaggcagaggggctcctcacatcccagacgatgcgcggccaggcagagacgctcctcacttcccagacggggtggcggccgggcagaggctgcaatctccgcactttgggaggccaaggcaggctgctgggaggtggatgttgtagcgagccgagatcacgccactgcactccagcctgggcaccattgagcactgagtgaaggagactccgtctgcaatcccggcacctcgggaggccgaggctggcggatcactcgcggttaggagctggagaccagcccggccaacacatcgaaaccccgtctccacccaaaaaacacgaaaaccagttacgcgtggcggcgcgcacctgcaatcgcaggcactcggcaggctgaggcaggagaatcaggcagggaggttgcagtgagccgagatggcagcagtacagtccagcttcggctcggcatcagagggagaccgtggaaagaggagagggggagggggagggggagggggatggagagggagagccacattgttatgaattaatgaatgagctcagaaaggttgtaggttacaaattataatgcatatacaaaaatcaattgtattttatatactagcaatgattacaatctgaacatgaaattatgaaaacaattcaattaaaaatggcatcaaaaataattactcagggaatatatgtagtgaaaaatgtgcaagacatgtacactgaaaattagaacacattattaaaagaaattaaagaagacttaactaaatggaaagacatccatgttcatggactggaaaacttcatattgttaagatggcaatactccccaaattgatctaccagtcaacacaatccctatcaaaaatcccagctggatttttaacagaaattgataagctggtcctaccagtcatatggaaatgcaaaggactcagaatagacaacaaatcataaaaattagagcaaagatggaggattcacacttccagatttcacaatttactacttagctacagtcatgaggacagtgtggtactggcataaagataaatatgtagatcattgaaatagaattggcagttcagaaactcttacatttataggcaactgattttttataatggtgtcaagacaatttagtggtgaaaggatagccttttcaaccattgatgtgggacaactgggtatccacatgtaaaacaaatgatgttggactctacctcacaccatacacaaaagtcaactcaaaatagatcactgacctaaatgcaagagctaaaattcttagaagaaaatgtaggagtaaatctttgtgatcttgggttaggcaatagtttcttggacgtgacatcaaaagcacaagtgacgagaaaaaaacagacaaattggacttcacccaaagtaaaacttttgtatttccaaggacactagcaagaaagtgaaaatacaggcccaaggaatgggagaaaacatttgcaaaattaaatctttgatgaaagtctagtatccacaatacataaagaacaccatcaactcaataataataataaaaaatccaatgaaaaacgggcaaagaatctgaatagacatctctcctcaaaagatatacaaatggtccataagcatatgagaaaagatggccaacatcattagctattaaggaaatgcaaataaaaaccacaatgagacaccgcttcacagtccctaggatgggtataataaaaaaggcaaataataatgtgttggtgaggatgaggagacattgaaaccctccaacactgcttgtaggaatataaaatgcaggcacttttgaaaacagtctggccattcctcaaaaggatagcatagagttaacataaaacccagaaattccacaccttggtatattcccaccctaccccccggcaaaatgaaagagtatattcacacaaaatcttgcccatgaatgttcctagcaatattatgcataatagctaaaaagtggaaacaacccaaatgtccatcaactggtgggtaagcaaaatgtggtatacctatatgatggaatattacttggccataaaaagaataaagtactgattcatattatagcatggatgaaccttgaaaatatactaaggtaaaatgagtcagccacaatcacaaaagaccatatattgtatgattccatttatatgaaatgtccggaatagtcaaatccacggagacagaaagtagactagcgggaattggaggaaataggggagagactgccaaggatttggggtttctttgggggtgatgaagtgttctaaaattagataacgagtgatggttgcacagctctgtaaatatactgaaaaccactgaattgtgcacattataaagataaattttatgatatgtgaattatatctcaattaagctgaggggtgtgtgtatgtgtgtgtgtgtgtgtgtgtgtaatattaagttgaaatgtaagggggggccctccattttcctggtgagaagatcccaaaaaagtttttgtttttgttttagttttagaaagagtcttgctttgtcacccaggctagaatgcagtgacagtctctgctcactgcaacctctgcctcctgtgttcaagcaattctcatacctcagcctccagagtagctggcattgcaggcatgtgccatcacacctggctaatttttgtatttttagtagagacggggttttgccatgttgtccaggctggtctcaaacttctgccctcaagtgatctgaccacttctgtcttcccaataatttttttttgtcaccttgaataaactacaacatgcctgacaaggcaaagtttttcttcaaaattatcctcaaaaaggcaggcaaaattgcactagtctcatttggtagggctccccacccccattccccacctcactgtcagggaccaacggtgaaagaccatagtgtacatttttatgacagtggggacaaggatttccctcatatgtaactctgcctccctctcttgaggctctcaagagagtggacatcggcggcttcttacttcttataaccactgctggactttcccctgtcagctcttccttcctcgatctcagaaggtctgtcaatcaggctttctgccctcctcttttgtgaccaaaaggtggacatatgacttcaccgggaatttgagtggagagtggggagactccaggagaacagtggatttgccttactgggatgctctgaggcaactgttccctggctgctgctccctggagtcagggtggctactccaggcctgtttgttttccttcaggtatttcttgcacctaagaacactaacttggtcttttcaggtattcaaggctagtcatttccatatcattgtcttgattttctcttgatggcaaagacagggtttctcagggttgtccagaaaatgaaggaggaaaacttttaaattatgaggagtcatgacctgaacaccatgacttccactgggcatcttctctgtagtttctatttggtgatcatttgctttaatattttaattgaaactctaaacaattcattgaatctaaactagatcaagtcatgttgtttcttagggcaataaaaagatgagcaaaatgatatcccaactctccaggaactcatttggtgtgaattctgactgagtggatcagagaaggtatcctttgtaatggggttattgaaatagagaatcatagactttggggcttctggggaccttacagatcagccagtcctacatctttcagatgaagaaatccagagtctgagaggtgaaatgacttgactagcagctgaatatggcttgggacttcctccttgactcttagtccagagcttatctcaccggttcaagtggttgaacttggctggttcctcagggagtctggagacaggagggacaaattttttgttttttttgagacggagtctcactccgtcgcccaggctggagtgcagtggtgcaatcttggctcactgcaacctctgcctcctgggttcaagtgattctcctgccttaggctcccgagtagctggcattacaggtgcccaccaccatgcccagctaatttttgtatttttagtagagacagggtttcaccatgttgaccaggttgatctcgatctcttgaccttgtgatccgcctgcctcagcctcccaaagtgctgggattacaagagtgaaccaccgctcccagccaaggagggacaatatttagggcttggtaaatagttgcccagggaaatatgtcttacaaggtcacccaagaaatcagcaaagaattgaggtggatttcagcagttctagtcacatgggacttgagaggggagactggcaccagggtctgcattgcaatgggagtgtcaaggtgtgtctttcccaaccttctacaatttcctggagatcttgaagcaggtcaatgctaaagggctaggcaaaacaacttctgtcacctccacggtctctttcctctagatgatccagtcagctggagttggattgtctttacctgtaaggacattagtcaaatacccagcagacagtgtgaggaggaaatcaattgacaaaccagggttggagtttcactaggactaacaatgaattattttacctggcaacttgtttagggcaggaagggcccagtgttaatagtatacattgctggttcttgacaaagagagcctggacactgttctttggggtggagaaacagtgtccttccaagctgtacttttcagtcattaatgggcacaattagtttatagaatgtttacagagaacttcccatgtttcaggaactatgctaggtcctgcagccacacataagtaagacgtgattctcacctgaaaggaactacagacaaacataagactgacatatttaatggtaagtggtcagtgaaaactcctggatgttacagagcacagaagaggggtatgcattccctctggggttcaggggcttggtagatgacatccaaaggagtcagccaggaaaaaagctccaagcctcacaggcaagagagccacatgagctcaggtgtggaatctgcatgtagggaaacgacaggcggtggatggtgttactagagcaggaagaacgagatggaaagtgtggggacataaggcagagaagcaggtgtgcacgtgtggaggttaagttatgggaaaggagttagtgtttattctgagcaggaaagaggggcgtgcctgaggagatctgcattttagatagatcacagcagtgtagatctaaggcagaggagccaagaatggagacagagaaccaactggaagagatgatgagtgtctgacgcaggggattcataatgagaaggaaggcatggattggaaaaatatccaagagatgagcagtgatggagacatggtgggtgagggagagacacaaatctagggtttctggcttgtgcctgggtggataatggggccataaactgagataggaaatacagggaaggggaacaagtctgggacagagatgttggcgatggctaacatttattaatcacatatatgaaccaggcactgtgccaggacttcttcatgcattttctcttaactccatgaagtggatatgattctcaatttatagatgaggaaaatgaaatttggaaatgttgaatagcttagccaaatctgcacagctggtagagtggtggaaaaaggtcagaatccatgcattctggcccactgctttatatgtgtgtatgcgaagagtctgaagagcctgtggggcatccacagtggagaggtccaggcattagggggtcatcggggcccagatcatggtaaaaaccatgaatgtgggtgaaatttctaagttgagcagtgaaggaagcaaagagccctggggaaccccgaagttaaagaagtagccagatggaaaggggtccaccaaagagccaaaaacaatagtctgattttgatttttaagtcagaagacatgaccatgttatctgggcaacaggaaactgggcaatcacaaacagtgtagctgtatcaaataaaaacattcaccaagttaagctaacatattaattataacagtgactatgttgcatagtaattatcctgaacagtaagcattttacacaaatagcagtaattagtatatcacaagtttcccaaactgtgtcctgtggaatagtagttcctggagatgttaataaatgtttggattaaaaaaagggctttggagtcagataagtttaaggaatactggtataatttagatagagggccaaactctgttttacactttctctcctcttttctctgttaggatgcagtatagtataatggctaagattgtaggcagtggaaacaatctggagttgaatcctgccgctgacaaactggataatcttgggtcagttactgaacttctctaaactgtagtttgctcatctgtacagggtgatagtcatatatgcacttcaaaaggcagcttctgggattaaatggaacgcattgcatttaaaacacttagaatagagcctgacatagagcaagggattcatgaggattacttattattatttataaaccatactattaacacatctccctgttattctacagtttagtccttgacacacacacacacacacacaagagcactgatattcacatttcctaaaagtgaaaacccgtggctctgacttctgttagttgaagttcttcgtgcccttctgtccaccacaccacagcctggaaatgagcaagctcttatccctattatacttcagggaaggggagcagggagagggaggatttatgccctggcagcatggcctttgaagggccactgctagctcatagtaacccttgggaacacttgaaagaagtcatcttctggttggacactggcttgtaccgtgacacacaggctagcaagcagtgtgccggctgtattttagcacccgcttgctccatcggttggatactcttgcgcagtgaatgacctgtgcaaccatacgtggcagatctgaccttcaggccctggaagggcctggaaactaaggactgttggagaaagggggtactagcttcgctttctccaggcagtccaggcgattagccccgcacaagccctaagtgtataaatcatccttcctcgtctccctcccttcctcccatagaggccacgcctcccattcatgaacacaaagactgacatcagaaaacccttagtgtgaggggataccccaggccttaactggtctctgaaatcccccaactgaggttgttagaggacagaactgtggaaagcagtaaccagagggaatgatttttccaggtttcccctgacacataacgaacactaacttttgatgcttcaaaccagagcaggccagggccagggcaagtctgacttcctgaccatggtttggagaggcgaaggggaaaagatgggagtgggagctatccccggcagcttcttaatccctactgtatggccaaaatgcttggttcccaataaaggctcgtcagcccttgaggtagacacttctgtataaaacagaccagaaagaaaaccgcaggcctgaggatctttcctgggagtgggatggagtgagggcaggcaggctcccaacgcgcacgttcacacccactctcccagaagtagtctcttgagcctccagaggggctgcttcctgggtgcacctcttttcagctagaagcaagtcaagcctgacctgcgggatctggcagggctctctgtacttggattctctcctttataaagtgaggggtgtggatgggtggtttttgaaggctcctcacagctctgacaggcaccacctctgggggcttctattcactctcctccaaccttgtctacctggacaggcagggacagacgacaagaaatcgctcactctcacccccatcccaggaccccaaggccataaatgtgcaaggacagcagaggcctgcgtaccaaagacacatccccatcaattttgcttcggctctgtctccattgctcctgtagacaaataccggctgggggcccagctgggagtttaggtccttcagcctcaaagaacaaaggaggaagaagggaccttcccggaaggtgaggggagggagtcctggggctcctatgcctctccctctccatagggctggctgtccctctctttctcacagatacgggaggagggagtgtcctgtcttttcctctgaggctggtgacttcatctcctcccctctctaaggttggggtctctacctcagccccatctgttccctgggtctgaaatctccatccccctctcccttttttctccttgggactgggggtctccacacccttccctctcctcctctctcaggaccatgtctctttattccttttcaggcctggcctctccagccccggggggaggggtccgcattcctctcctttcttaaggccacggctccctcccccacccgctccagctcctcctccccaccccctccctccgccccgaggcattgtgggaggaaacaagatgtggggcgagagcggcgcggggagaagcccgcagtgcggggccgggcgggctcagccaatggggagcgcggacggcggcgcgcgcggcgggggggcgggggcggggcactatttcagcgggggccgcgcgtcggccgcgctcagcggcagagcggagcggagctgtgaggcgccagtgcggagcgggcgggcgggcgggcggcgtgaggcggagcgcgggcggccggcgaaactccaagggcggaccgcggcagggagcgatcggcctcgggctgcgggagccggagaccgcggcggcggcggctgctgcagctgcaggaggagcccagggaacaccgcccctgcctgtgctctgcctcgggccatcgctcctccccagggcccagtgcggactcgcctccgtgaaggtgagcggtgggtgggggcgtcccccgggtggcgggcctgtgtccgtcgcgtgcgactctacacgacccggccctcgccgcggtggccctgcggcctccttagccggccccaaggcctggaacagggctggccccgcagcccttggcgttgacggtccgggcagcgcagcgcgcccccgccgcccctccctctcggcgcagcccgggctgcgccaccctttgccccggccaccctcgtggcgctgctggaggcccgggctgcggagctgccgctgcccccgcccccgggagtctctctgcgctgcgtggaggcccctgatgtcaggggccggggaagagggggtggagagggctcgggcgtgacgcggctcctcctgccgccaccgccaccctctggggcgtccttcctgcagcgaggacgcccagtcactccggcgctgttccaggccgggtgggggagggcggccgaccggccggggcctgcggacctggccggcggcgcgggcgggaggtcggggggaaggaggatgcttcctcgttccccaggtgctgcccttcgggaccgcagcgctctggaggatgggatagtggagggatacggcccacttggagagcccgaagagggaagtagaagtgtgtgtgtattggcgggtggggatggtggtccgtgtcattcggagatttagcctttttttttggttgcaaaaccaggaatagaggatgggagctgtcctggggtgccctttgtgcttttcacaggagccttggctcgtgactgaggctgctggcctggggccctctggccatcttcctcctatctggaggcccaggtcccttgctttttcccaaggagggaggggctaggctggacaccttcctgtgctttgcttaccggcaccttggacaggggtggtaggggttgggcttcacctctctcagatgcctggggggccattgtagtcgtaagaccaatattatgtaaccgcaggctctttcctggagagtaaggtggcttttaattactgtaacaaagttgctcctttggactttgggaatgaggcagtggagcaggtgagcttgcaggcaaaatggtgccaatttcatactttcactttgctgtctaaccaggccccacccccacccctgggtttgtaaacagtgcccccttctgagtggtaacctggaataggccaccaggtgacactagtttttcttcacttatacagagccttataatgtaagaacctttctccctgtgctgctgttgtacctttgctcagacccatttgagtttaccccatttatctcatttcaaccattagtatttaaaatgaagatgttgatttgcccaaggtcacgtaactagtcattccttgaacagggttctccgaatctttcctcagcaccacatggtgctcacagactccagttgaggctctgacttttcctctccagaatgtgggggcagagggtgctggtctactacctctttgctctgccagtttctgccgaagtggaaccagccctgcttagtttggcagtgctatctagatgaaggggccttggatgcggtcaagggctgcctggctggcagctggcatgtgtgcattctctgcatgtggtgcaggctgaaatggtggtggtgagttctgttttccctttcagccatctagcccacaggctattgtgaactccgagatcaaggtggcctggaatgataccaaggatatgtccttgagcaggcagcctcctgtgtagccttccatcagatagagctggaatgacagcatctcttgtccattgggctgggccacagaggggtgcttttaggggtgggatgatgggggagatagttactgctccatgtgttgggactgtggtcaaggacaaagggctcatcccctctgttcctgcatagtacctcacatgttgccacctgtcaggcacgtcctgagattccgctcgtcccaagaagggtccatgcagggtctgcctggaacctgtggttgctatggcatgaatggcatggccttgatagcagggatatgaaacaaggctattaaaatctttacctttcttaggcacctttttaaaatgctttatctccaggtttttcccaagcctctgtttttttaggggaaggaaggcttcagcattcctttgaggaaaataagatattgtctcctaacataatacctttcacatcacctaataggtcagtactttttgaatgaatgaataagtttgacatgaggaagcaacgcaccaaagagatgagaaatcagtgttgaagctgggtccaaaatctagggctttcaaaaattatattgggctttaaagaatgaacattgtactgaggagagtggggaagcagaggggaggatgggacagagagagacatgtcctgtgtgaccgaccagccaagtctgaggttgccttcccaccctctctacctcttacgggcatctcagcctggagtacttgagagaaggcataattatcattatctctgccccactggacattggtggcctggaatagggcctgtatagggcaggggttggcagcatttttctgtgaagggccagataggaaatatttttggctttgcaggccaaatagtttcttggaagtactcaactctgctatcgtagcatgttcctgcaacactttattttacaaaaacaggtggtaggctggatctggctgatggacagtcccttgtagactgtccttgtgtgcagatgctctcatataacttcagttaatctttacaacaactcgcgatagagagctatcctcacctgctaaaatgaaaataatcaaatgtaggaaggccaagtgacttgtctaagaccacgagagataaactcaggaccaggagtcaggcctactgagtcctagtccagcttctttctgctatgatgccaatgatgtaatgaatggtcattaaatcagggacttaattctgttcaaatgttaggacacctggtttattctcaggacaacccttagtccccattttacagataatgacataaaaacacaaggattaagtaacttgcccaacgacacagctagtagatgtacactgtaatataatcttgactattggtgctcttcagaatatcggaagtaaattttagagttggaaaatctcattttacttatgataaaaactgatgagttattatgtcctattggccctgtatttcccagggtgggaacaatgtctctgccaaagcttaggggctccctctcctaatgcttcacatccgtgttttctgttgccctcaccttctatactcccctcttgcactgagaccccacacccagcagctaatgttcactgcccagagcaaggagttgtcagccttacctctctgctccttctgtagtgtcacaccatgtctgaccggaaggcagtgatcaagaacgcagacatgtctgaggacatgcaacaggatgccgttgactgcgccacgcaggccatggagaagtacaatatagagaaggacattgctgcctatatcaagaaggtgtgctgggagagctgggactgatggccaggggtggggatcgacagctgagctaacctccagggagatctggagctggggacataagaaagcccgtatatcctgtgcaagcaaaaccctaggaacttgcaaagcagacaaactagcgagtgattccgaattgcccaagcattcaccttaggagttgttaatagctctgccaggtgtgtgtgtgtgtgtgtgtgtatgtttacttttacaggtaattatgctactgcaaggcattggggaaggataagattatgcagagaaacttcagaattaaatatttctggcccagttcagaactattcaaaattaaaatctaggatatttgaaagaataagatgtacaaattttcagggaactacatcatttaaagtggatatgcctgtaataatcctcatcatgtaggaggtttccttttcttttccttaaaaaggactcaggtactacatcacccctttctgtctacattcttaagaaaagggtgggctcaaatatataatttttaagaaatggatgagcaataatggggccataggtttggtccctgaaaaattcctgagtgaatttgtcactggatatggttaacatggtgaggaagcagctgtgccaaaagtaagaaaaggggtactgggaccccctgattcccagtcaggatccatatccattggaggcatagtcccagcatttgatattctcagctctggcatcccaagaacatgtgtaagaatggtggcagtctggtccattgaagtggaagtggtagggtctctgagttttacagaactgtgttttcctacccaaatgggtggaatgaaaagaagaactcctggagtcctgagggacttttttgggtgtgagccaagggtggcagagctatttgggagcccaccttctcgctgtcctgtactctgagagccagaagaatccccagattttctggtctgcgctctttttttgctgatggagaaatgagaaccagggaagtgactggctctcctgtattacacatagtcttgagccgagattgaagctgggtttagtatttactcctagtacttggagagttgtgtggtatcggggctgtgaagaggccagagaagttgtatgttgagcatattgagggatagaaccccagagttggcagcgttggtgggcccatggtggagggctgctgccctttcatggccatggcaggatgcttctagaactgagtctgcaggctgagccacaaggtagtagggagctgattagctctaaagatttcctgtggttttgatgctgaacttgtgccccttagggaattgccttgatctcatggtggaggtccttgttctggtacatacagcccacacagtgcatggcacacgggaatgcctttaatgttgtcttatatagtagtgcctcctggtactcccgatgtttggtcttgttttgctctaatgccttggtgtttagcatttggaaatgctggttaattatgtgtgaggcagcgggtggtggctccccatttgtgtcatgtgtttgacaaatggtcctttattccactggcctcttgattcccttgctgaagaatcccagggtgggctaggggtggcgtgagggggtggggtagctagagggaggagagatgatcagggtgtagagtgctggaggctcaggggagacgaataatggaggctttgtggtgttccattattaatgaggggaagagtgtcctggccagctttaaaacctgagcttttgaggttcggggagctgaggctgagggatggggtgggggtgataacaaccaaacgtgtcggtgctggagttgcagggagagactcccattctgatttctccttctccagctaccctaattacctttcttctctacctttgttcttttttaggaatttgacaagaaatataaccctacctggcattgtatcgtgggccgaaattttggcagctacgtcacacacgagacaaagcacttcatctatttttacttgggtcaagttgcaatcctcctcttcaagtcaggctaggtggccatggtgaaggtgtcagtggcggcggcagcgatggcaagcaggcggcgttgctgggactgttttgcactggagccagcatcaggatgtcctctccaatggctgtgctactgcatggactgtatactcgatttcatgtgtatgtcgcagtaaacaaaaccaaacctctttctgtttagttgcctgggggaagaaggctgctttatgtttatttttcaagactttaaaaatattttttggttgtattgcactaggaaatctctcccacctctcccttttctctttctttccctatacaaaataaaaggcccaccatagagactaggcggccgaaagactaggagggctgaggaaaagaaataggtctctggaggtggaactaaaactgtgcagctgcctcttcctggcggtggatgctgctttgggagggccagggaggctgcagggggacagtgttgggattgtcaaggaaaaaggggtaggaaggaaggtggagggattgatctagtaccagggagaatattccactgaactgtgattctatggcttggggcggagggtggggtggggatgccttctttaggggccctgagatgtgtttgtctgtggtgtgtgggagtggggagcagatttgtcttgctgtctttgtcagaatttctaagtaagggctgtgtctttgtggattaccttcttttgttcttcctgccagagatcatgacaggaggatgctggggtaggattagcttgaatcttttttttctttacatttttctcctgtctgctccctgcttagccctcagtttcctcattcctctggagttctcttagagcagcccctgttgttagttggctggcaagggaatttctggtgactgtagttccttagttaggtcttagcaatcaaaccaaattgatgtctcccttgactcttctgtgtatatgtgtgaatatgtgtgtatatgtgtgtgtatgtgtgtgtggggtttggggtagaagggagggagggggcaggacagtgtggaatctctagggtgtatgggtaggtagggggcacagttagttctaagtgggcttttatgctaaaagcctctggggatatctgttttgaaaataaagataggtgtcccctccttgctgtcatctagcccagacactctgcttgctctctggctgtctgctccctgggaaggctttaggaggaccacccaggacaggatgaccatgctgccatctgctctggagctgggtctcagtgcagagggacagtgactgtggatggttgcagtctctggtgggaggtgaggatagaagtgataaagagctaagaggagcttctgggagccttggaggaggtcagtcttgcagtggtgaagccaggacataggagatggagcagggctgtgagaggaggagattctgaggaggatgcaggggaaatcttgtctgttaatgaaataggagtggggtggggtttggggtggggtggtcattgccgtttgagctgctgattttcatgagtcgccttcaaaactctcgtgtagggttgacaatgtgggggggtgggggatccagcttattcttttattttcaagtccattcttggggctggtggggaggcaggagaatacccctccctaagcccttagtgtgtgccgagcttgctttgtgatgttggcaggggaggggagacctgggtggtgactgagttccctttatcaaacccttcagtgggcacaaaattgagtgcttgattttaggttttatttttttatgaatgtccaaatctgtgtttccccctgccctcccagactgtgtggccagttgaaagtgtctggtttgtgttcatctctccctcatttctggagcagggcctgagaccctgccacatctcctatgctctgcatccacgcctcttttggacattaaaggttgattgatgcacctctgcactgtttgggtctctttggggatgaggggttggcatggtggcagtggtgccacacagtgggtgagggtggagagtctccagggtggaatagaatggggactgaagggaagaccagccactagatactgattggcctgtagcagcacttatttgtgcctaggcttatgccccttaagtagaggaaaactaaccagcagcactcacccttaagggctcctgggttctgccttccttggtggtgatggccaggtgaatcatattttgtgtctttgggatagtaactgctaccttcccagctgccgtcatggacctgcctgagctttgctgcttcaacttttgcccaaagctcttatctttcatactcctcccttctcggctttcctgaacctggagactatttagcaaagggtctggccactcagaaatggaaagctggggatatttagaaagatggcacctcttttggtggaacctaagtgattctctgaatcctctgttgcccagacacacaactcgagaaatcagcagtgccaagacttctgagagtgtctgcccacccctgactccaccatcgtgtgactgcaattctcttggaggtgttagggagccagaggtgctttgccctctttgtgttactatttctttactcaaaaatatttaagagttcttgtatgcttgggcctaggatgctgttcacagaggagaatgagacaagtaagttctaggcttctatgacatacacattcttatgtgtagagcagacatacacacactgatcaactttttccaatagtgataaatgtgttatcaaggaaatgaactgggcaatgagctattgagtgttggaggtaggtagatagggttcctccagttaggaaggtggttggctgatcttggggagaagttctacctctggggcagtgaggtcctaagggattaagttgagagactctagagccccaacttctgttactgctttagctgtcgtgagtaatttgacagagctggagctttgggagggagagtgaggccacagttcacatttcatcagggatgagtgtctccagggccaaagctcatctactttcttccctgatgaaagaggcagtccaggtggcatctgtgaacaacacattcctgcacaggtaggtgcacagtgctcatctggaagactaatcctgcagggcttcctggaggagatgagcctccacttttcggggcccaggatgggaaagtatgtgagcatgtgtcactgaagggactgtggaaagcagatggaaattgtggaattctctcggaacaatgcagccattattagaactgtgcccataggagcatcaatatccctgctccttgtatcctgttctccagtcttctggggaccccctttgactgaacccaaccaaatggcagatgacaaggcagacccaggatgcagtctgtagggttcagtccccctccccactgggaacagcaggaaagggcaaggtggtgacaatctaagggaggcaaatggataataaccagcatggtagggaatcttctttgttgctgtggcactgtcgatctctgttccctgaactctagtgtcctccagactagatttaaggtgtggttccccgctaaattattctctcacctcctttcagtctttgctcaaacatccttttatcagagaggctttctgacatcctgtgcaagatagcacctctcccccatcgctgttatccttacccagtttaattccacgtagcatctgccaacgcttgacatatttgttttttgtttactttctggcctgtgacaactagaatataagctctgtgagagcatttttctcttaactgcttatcttcaagtaaacagaacagtgcctgtcctgtaggaagtgtttgatacatacagattgctcaaatgaaaaaagaagggtgcgagcaagcctggacaggcctggtgccccagggcagccttgccttttctgaagagaatggctgccttaggcacggctctccttgctgcccaagccttgccaccttgaaaggcgtgagagggtcactcccaggtgtattcaagcaagagtgcctgagccactcttgcttggcagtatgggaggatgaaatagtgtgttcataaagtgcattttatttttaaagcatttcagtttatgttgctgaaacctgagagcgcccccctgagctagactcagtaatcattagacacatttttggataagcaaactgaatcagagaaggtgagtggcaaagcccatgtagctggtggcattactagaacttagcactgtgatgcacaaaggcttaactgggtttggcagcaagggtctcatggatactctttaagatgtaggcccagatctcttagtagtgaatccctgatgttccctctcttggggctctggtttagcaaggacagcgaggatactttcctctctccctcctccttactcctctctactaaggattaaggagccacctcttcctccttaaggcctttgggagagatgggtctcctggtattagaaaggagagcagacgcctagagttctgacctcttgggcctcccctaaacaaaaagcatagccccttcactaccctagtaacaagtatgacctgttgcctgttgaggtcaggtgtacctgtgtgtctctctctgtgatgtatgtgggcttggtgtccacatcaatgtgcgtgaatactcctacccacagactgctactgtgccaatatagaggttcataagaaagataaaagagaaccagcagaaccccaggttctgcctctccttcctccctttgcccagataaaggtgtacagtgtttgtggtgaggctgctggacactgctgttttgggctttctagagagaatgcaaacatgcaaaaacagtgtggtagtgtaggcagaacaagatctagaatcagaagacctggagtcgaatctcagctccaacacccactggatgaacgtggacaagctgcttgatctctcagatcctcgatttcttcatctgtaagatggaaacaatatgtgtcttttctaaggggaaagatcaaatgacatcatgtatgtgaaaatgcttagaaatgggtgatgatgatgatgatgatactgattattagggtatctaataaagttggggaaagaacaaaatccccccctcacaccctattgcaccaccagccttctccctccctgctcaattatacccatgttatagggaaggaaatagggaagaaacttgtctaaggtcacatggatgttcgcaacaattgggatgcagaacttgatctgactcccaggccaggtttgattttgatttgcagtggcagagaggactaattttttactaggttctgagccctgtactgaactctggattgccctgtacttggtggtggtatacagttcagcagtttttagcatatacacgaatttgtgcagccataaccactatctaattctagaacatttttatcacccccaaaagaaatcatgtacccatttgcagtcacttgccattccctcttctccccagccctgggaaaccactgacctaccttatatctctatgaatttgcctaatctggacatttcatataaatgcaattgtacatgtggccttttgtttctggcttctttcacttagcatgttttcaaggttcatttgtgctgtagcatttatcagtactttgttcctttttctagctgagtaacgtgtgggtatatcacattttgtttattcatctgttgagggatgtttgggttgtttctactttttgactattgtgattagtgctgctatgaacattgatgtacagatttttgtgtagatatgttttcaattatcttggggcatcttttatttttaatgtcagttttctatttttaaaaaatctagacaggttggcaaatcatttctgtaaagagtcagtaaatattttagcctttgtggtccatgacattaggtatacagattacaatttctgaactctgccattccagtgtgagagcagccatagataatatgtaaacaaatgagcatggctatgttccaataaaacttttaaaaagcaggggacagattgggcctgtggaccatagtataccaacccttaatctaaatgacacattcacatgatacattattctaaaggcacaaaaagcaaaaattctccctcccacctctgtcttccagctacggggttaccttccttgaagcagttaatgttatgagattttgtgtctccttttagacacagttaataatgagcattaaagtggctatatactattccaatgtgttgcagatagtttagtcaacacaaaagaacggacatatctgagggtacaccctaaaagtccttgaggaacagaaccctaaaagagagaacacctgcctaatctgactcctccatcagaataatcttttgaactcctgagatttgcccagtcattttggggccatgtctgatgaaagcttggtgatcccttttgggtcaaaaacaagctctgactgaagagatgcaagattttctcagatgatttgtgtgtcagtcagagttccgccagagaaacacaaccagtaggatatattctatcttgtctgtcttcatatccatgtatctgtcatctacctagatttaatgcaaggaattggtttatgcagttgtaggggctggctaggcaaatccaaaatccacagggcaggccgtgtggaagggaggtctggaaactctcagacaagacctgacattgcagtccactggtggaatttctccttcttcagggaaacctcagctttcaacggagtggatcagacccaaccatattatccaggataatctcctttacataaagttaactgattgtagatgtaaattacatttacaagataccttcatagcaacacctaggtcagtttttgaataactgggtattatagcatagccaggtcaacacgtaaaattgatcaccacagtccatgtcttgttaacttggcacctgtacacatttccttaaaccatttaatctcccaataaagacaataacaaagtaaaacttctgcctatcatgacacagctaatctgtgtacaactgaaaatatgctcttttcctgggagagaattcacagtccttgactggtgttcacttttatccttgataatccagtaactttaataatattatgtaaatgtagctattttaataaattttatgttagatgacaaggggataagagagggaagaaaaaatacataaacacaaacattcataacaaaacaatgaatactcataataattatagtactaacttctgcaactgttcacatgatgtgttttataactaccggtgttacaaaattactggttatagctggtatgtgtaactactttccttcacgacttattccatattttctttgccttcctcatgaaactcagagctggttgtggttctttgcctggtgggagggccccaaactttcattcctgaagggtctgggaaattagaagtcttacctgcattggtttattatagttttccactggttttaatcaccatagggcatggtagtactacgagatgacctaagggatctctcgtattccagacataacttttcttcctttcattgtttagtagcagcctaatttccctttggtagtcaggaggaatcaccctagccagtggagtaattcttcattgcaaaatgacccatggcagtcttaacttccagttcagtgaaataattgtgactcctggtgaaagcattcctccctttggaatgaagacctccagatcagcaaagcataaagccacagggatgggaagcaaagatttaccagtggaccactaggggtaatagtgagttgtgggtgccgtttcatttctgctactgatccctggaaccatgaatcctagctatgcgacaaatagtaccatatgtgggatgctgagttggagtatatatggtctcctgaaggacattgtctcaaccctgcaaggtgttgcgaccgagctggcactgtaactagatcttcaaaaggccattccgcctttctatcaagccagctgcttcggtatgatggagaacatggtaagccatgagcacgggcccattgctgtacttcacttgctgtgaaatgagtttattcatcaaaagcactgctgtgtggaaaaagtggtggtggataaggcattctggaagtccatagatgatagttttggcagagcattaaatgcagggaaagtaaatccaaatctagactgtctgttccagtaagaacaaagtgttgccctttcatgatggaaggagtccaatcaacctgccacaaggtggctggctgatcaccccagggaatgttgctgcagctcagtattggtgtctgctgctggcagattggcagattgggcactcagcagtggctgtactcagactggccttagtgagtggaagtccatgttgctgagcacctgaataccttccatccctgccaccatgtccacttttccagattcctatagaaatgaaattgtacagtaggtaattctttggggctttggtttttttttcactcagcataattattttgagattcatccatgttgtttttctgtgtatcatagttcctttttaaaattgctgagtagtattcaattgtatggatatactaaagtatatttgttcctcaattaaaggacatttgggtttccattttggcaattatgaataaagctgctataaacatttacatacagatttttgtaggtttttatttcacttggataaataactaggagtgggattgctggatcttatggtaagcatatgtttaactttataagaaactgccaaactattttctagaatagccacaccattttgcatttccaccagcaatgtatgggactctcagttactcctcattctcgtcaacacttgccattgtcagtttcttttttaaaaattttagctatttgaacaggatgtggtggtatctaattgtgggctttttaaataccacattttttaattaaaaaaatttaaattggctggatgcaatggctcacatctgtaatcccagcactttagaagtctgaggcaggtggatcaattgcactcaggaaatttgagaccaccctgggcaacatggcaaaactctgtctctccaaaattaaaaaaactagctggatgtggtggtgtgtgtctgtggtcccagctactcagaaggctgagatgggaggattgtttgagcctgggaggttgaggctgcagtgtgctgtgatggtgctagtacactccagcctgggtgaaagagcaagaccctgcctcaacaaactaaattaaaattttatttttgaattgacaaataataattatacgttttcatggagtacatagtaatgctttgatatgtataatgtgtagtgatcagatcagggtaattagcatatcatcatctcgaacatcatttctttgtattgggaacgtacaatattctccttctagctatttgaaactatatattattgttaactatagtcatcctacagtggtattgaacactagaacttattcctcttatctagttgtaattttgtatcctttaacaaatctctccctctccttcccttcccccactcattgtggttttaatttacatttctcaagtgactaatgatgttgagcatcttttcaagtgattatttgccatgtatatatctttgattaagatcttttgctcatctttttactgggttgtttgttttctcaatgttgagttttaagaattctccatattttctggatacatgtccattatcaaatatatgatttgcaaatattttctctcaattggtggcctgtcttttcattcatttaactatcttttatatagcaaaaatgtattaaatttttatgaagtccaatttattctcaattttcttttggtgttatatttaagaacattttgcataacccaaggtagcagggattttctcccatgttttttctaggagttttaaagttttacattttacgtttagatctatgatccatttggagttaatttttgtatatgatgtaaggtatgaatcaaggtttctttcttgtttttgttttgttttaaggatatttcttttttaatttttagagacaaggtctcaaggtctcactctgttgctcagtctggagtgcagtggcaccatcatagctcactgcagccttctaactcctggctcaaacaattctcctgcctccgcctccgaagtaatggagacgacaggcacttcccactgtgcctgactcatctttaaattttttgtagagatgggagtcttgctttgttgcccaggctggtcttgaactactggcctcaagagatcctcctgcctcacgagggattataggcatgaggcaccatgcctgtctatttcaaggatgtaaaatatccttggcatgagaaatgctcatgacataggttaattaggaaaatcaacaaaatacaagaatacacatgtacacacctttcaattttaactttgaaaataataatgtataggtaaatacttattcatgatcattcacatatctatcttgtaaacaaattatagatatattctgctttctaaaaatccaatctgtacttttcagctgctgaattggggataatttgttatgtagcaatatgtgatcagttacattttctatttgtctcacctatttttctccttttctttgtggctttcttttgtgttgtttttggttttggtttggagttgtttttttttttctctttgagacaaggtgtcgctccttcacccaggctgaagtgcactggcatgatcgcagcacactgtagcctcaacctcctgtgttcaagccatcttcccacctcagcctcccaagtagctaggactacagggatgtgccaaaatgcctggctaatttttttactttttgtagacatgtggtttgagacccagactggtctgaaactcctgggctcaagcaatctgcccatctcggctttccagtgtgctgggattacaggcgtgagccactgcgactagactttcttttgaatagatcaattttttaatcattctgttgtttttctctgtcattttggaaactataaattattttcttatgtttttagcagttactcaaagacaacatatgcattaatatatcgatgtctataattaatacctatatatatagaccttaaaaacacttttaaactccacttatccccttccaacttgtacattttatgggattgtattataattcatattattattgcattccacaattattttagctcactttttaattcttcattcattattgcatctcaaaagtatataattactttcattatttttcttttgtgaggtttatttcttttttcttctcttttccctttcaccttctctccccttcttccttttgtcttcattcctttcttcctctctctctgcatattgtcatcccatccaattgttttaatatcatttctcaaaagactcttttttctccattaaattatctttgcatctttgtaaaaaatcagttggccatatttgtggattcctagatttctattctgttccatttatctatgtgtctatccttttgccaatacaatactgtagctttatagtaagtcttgaatttgagtaatgtgaatcttccaactttatcattatttttcaaaattattttaactattctggtttctttggctttgcatataactttaaaaatcagcttatttatattttaaaaatatcttgctgggatcttgatttgaattgcatttaatctatatatcagtttggtggcaattgatagcttcacaatattatgttttctgatccgtgaacatggtatatctctctgtttatttgtcttctttgatttttttccatgactgttgtaaaattttcagcatacaggttctgcacacgttttgttagatttatttctgagtatttctgagtttgatttctaagcattgctctaataacaaatgctattgttaatagtaattttattttttttaaactactgatttccaattgttcaatgttagtatacagaaatatgattgatatttgtgtattaactttatattctgtgtgtgactgtgctaattcacttttaatttctaggagcttatttgtacattctgtggaattttgtacatattaaatcataaatggaaacagttttatttcctttctgtatgctctttttttcttttctgcgcttgctagaactttcaatatatattgaataggagtggtgggcatgaacatgcagcttctggatcttacaggatgccttaattcaggcttctataacaaaaatgccattgaccaggtggcttaaaccacaacatttatttatcaaagttctggaggctgggaattccaaaatcaagacattggcaaatttggtggctggtggggacttgcttcttggttcatggatggttgtcttctccttgtgtcctcacatggcaagagtaagagctctctggagtctcttttataagggtactaatcccattcatgagggctctgctagaggtcccacattccaaagtagagcctttgccagagccctcatgaatcaggcattaggaggtggggcctcctcccaaaagtcccacctcctaatcttatcacattgagggttaggatttcaacatatgaattttgaggggtggacacagtgggcacaacatctttttctatagcaaaaaggaagcattcagtttttcagcattaagtatgatgtttagagacagggtcttgctatgttgcccaggctggttttgaattcctggcctcaagtgatcttcccaccttggtctcccaaagtgttgagattacaggcataagccactgtgcccagctgtgttttttgtttttgtttttggagacagagtctcactctgttgcccaggctggagtgcagtggtgtgatctcagctcactgcaagcagctgtatttttaaaaatacataggtgccctttatcagatgtcttttactcctagtttctgagagtttttatcttgaatagatgtttaaatatgtcaaatgcttttcccataactactgagataatcatgtggtttttctttttactctattaatatgggaaattacattgattgatttttgaaagttaaatccaacctatattactggaataaacttcacttggtcatgataattatccttttttatattgttgaattctatttgctaaaattttgtttagaagttttgcacacatttgtggatggatatttgtatgtagctttctttccttgtaatgtctttgtttgattttattattataataatgctagtgtcatagaatgagttaggaattagtccccccttttaaattttctgcaagggtttctgcagaatgagtattatttctttattaaatgcttgatagaattcactggtgaatccatctgtgtctcaaaatttcttgtgggaaggtttttaactggaaattcaagatttagggctattcaggttatctagttcttcttgagtaaagtttggtattgtgtcaacttagataaagttatttctctatttcatctaacttgtagaatttattggcataaagctgttcataatattttcttactatatgtggaatctacagtgatgttatctcttagccctaaagctggtaatttgcatcttccctctttttttcctgattagttctgctagaagttattaataattaacattgctaatcttttcaagaaaccaacattagtttcatttattttctcaatttttctattttttatttctattccaatctctcttatttccttttttctacttactttcagtttaatttgcccttcttactctggtggaaactgaggttattgatttgagatatttctccttttcgaatataggaatttagtgataaaattttactctaagctttagctgcatcctataaattttgatatgttgtttttttcatttttcttcagtccaaattactttctaatttcttcttcttcttcttcttctttttttttttttttgagatggagtctctcactctgtagcccaggctggctggggagtacagtggcacaaactcggctcactgcaacctccacctcccgggtccggttcaagcaattatcctgcctcagcctctggagtagctgggattacaggcaagcgccaccatgcccagctaatttttgtatttttagtagagactgggttccaccatgttggccaggctggtcttgaactcctgacctcgtgatccacccacctcagcctcccaaagtgttgggattacaggcatgagccactgtgcctggcccaactttctaatttctttttgatttttccttggcctatgaattatttaaaagtaaattatttattttccaatattggaggatttccagttatttttctgttattgatttattattaattccattgtggttagagaacatactttatatgatttgaatccttttaaatgtatttagacttgttttacagaccaaaatttggtctgtcatggtaaattttcaatgtacagtttaaaataatgcatatactgctactattggtggcatgttctataaaagtcagttgggccaatttggttgatagtcttctatatccttatgatcttccatctacttgttctctgaataattgaaattcagaaataagtgttgaaatttccaaccataaattatgtatttgtcatttttttcttaaatttcttcttcttttttttttttttttgagacagattctcaccctgtcgcccaggctggagtgcagtggtgcaatcttggctcactgcaacctccacctcctgggttcaagcaattctcctgcctcagcctcccgagtagctgggattacaggcatgcatcaccacaccctgctaattttttgtatttttagtagagatggggtttcaccatgttggccaggctggtcttgaactcctgaccttgtgatctgcccgccttggcctctcaaagtgctgggattacaggcatgagccaccgtagctggccttttttcttaaatttctatcatttattttgctttatgtattttgaaactccacgtatttaggattattatatcctctatatgaatttattatttatcattatgaaatgacccttttcattcatggtaatattctttactctgaagtctattgggtcttcagagctttcttttgattactattagcatggtatatcttttcctacctttttacctttaacctatttgtgtttttacatttaagtggtttttttgtaagcatcatataattggatcttgcttttcttaatctaatctgacactatctttctttaaattgtgctaagaacatttatgtttagtgtgattattgagatgatcacaatatcttgcttttttttatatttgtctcatttctttgttccctctttccaccttttctgccttcttttggattaataaattttttaatgattccataaatacagatacttcttgacttatgatggagttatgtttcaataacaccatcataagttaaaaatattgtaagttgaaagtacactttcaacttagatattttcaacttatggtgggtttatctagacatagcccctttgcaatttgaggagcatactgaatgcttgtcactttcacaccatcctgaagtcaaaaaatcataaattgaatcatcttaaattggggactgtctgtagtttattggcttatcatctacaattctttcttttgttattttagtgatttagagtttatagtatacaactctaacttaccacagtccaacttcaagtgataacatcatacacatcatgaatcgtatatacaatggtggtcagctacattataattttatgggaccaccattgtatatatgattcatcacttactgaaacaatgttatgtgatgcatgactatatatgtgaagtggcatgttgtttgacagttaacttttgacataattagtgacatcatagccattttaacatcatagcacaatgcattactcacatatttgtgatgatggtggtggaaacaaacctactgcactgctagttataaaaagtatagcaaatacaattatgtacagtatacaatacttgataataaatgactttgttactgatttatgtgtttattatacttttgactgttattttagagtatactttttctaattatatcaaaagttaactgtgaaacaacctcaggcaggtccttcaggaggtatattccagaagaaggtattgttatcacaggagatgaccatgtgtgttattgcccctgaaaaccttctagtaagacaagatatagaagtggaagatagtgatattgatgatcctgaccctatgtaggcctaggctaatgtgtatgttcgtgtcttagttttaaaccaaaaagtttaaaaagtaaaaaaaaagaaaaaaacagaaaaacacttatagaataaggctgtaaagaaaatattttttgtatagctgtacaaagtgtttttgtttttagttatgttattataagagtcaaaaagttaaaaaaatgaagtttataaagtaaagttacaggaagctaaggttaatttatattgaagaaagaaaaatatggctcggcctggtggttcatgcctgtaacactagcactttgggaggccgagtgaaaggatctcttgagcccaagagtttgagacaagcctgggcaatatggtgaaatcccatctctacaaaaaatacaaaaaactagctgggcatggtggcacgtgcctgtagtcccagctactcaggaggctgaagtgggaggatcacctgagcccagaaaatcaaggctgcagtgagtcataactgcacccctgcattccagcctggatgagagtgagaccctgtctcaaaaaaaaaaaaaaagagaaaaacatacattaaaaataaatttagtgtagcctaagtgtacagtatttataaagtctacaccaatgtacagtaatgtcctagggcttcacattcactcaccactaacttcactgtgtcatccagaacaacttccagtctgaaacctccatttatggtaagtgccctatgtaggtgtactttttaaaaccttttatatcatattttatggtgtcttttctatgtttagatatgtttaaatatacaaatacttaccattaagttacaatggcctatagtatttggtaccataacatggtgtacaggtttgtagtgtaggagcaataggctaaacatatagcctaggtgtgtagtaggctacaccatctagatttgagtaagtacattatgaggtttacatagtgacaaagttgcctaatgatgcatttctctgtatgtctcccaaaagctaagtgatccataactgtagtggaaaaaccatcccagcgtttatgctattgatgtcatatattttacttctgaatatgttgtaaactcc[168 bp omitted]cctcagcgtcccgagtagctgggattacaggtgcaccaccacgcccagctaatttttgtatttttagtagagacaggatttcaccatgttggccaggctggttttgaattcctgacctcacgatccacctgcctcagcctcccaaagtgctaggattgcaggcatgagccaccacacccagccaagaaatttaaataagaaaaaaaaatttttttaatatatccacatggttatgatttttggtgatctttactcctttgcctgtatccagatttcagtctagtattatttctcccttgcgcaaaggacataatttaacatttttgttttaggggccatcagctagtgatgatttacttcagcttttgtacctccagaaaagtgtttctttcatcttccattttgcaagatacattttctgggtgtagaatcctaggttgatagttgttttttttcttttagtactttaaagatactgttccactgtctacatgcttgcatttttctgtcaagaagtctgttatcaatcttatccctgtatgatacatcatgatgtagttttcttcatgttgcttgtgttaaggttccttgaactaagaaaactcgtggttgtatagtttccatcaactttggaaaatttccagccattattttttaaatatatgttctctctctcctttcctgtccttcagggactccaattacatgtatttagattgctgaaaattgtcctccatctatctttacgtatcgtctttttcagtttttcctttctctgtattttattttggatattttgtattgtcttcaagttcactaatcttttttttttttgcaatgtctaatctgttattgatcacattaaatgtatttttttatcttatgtattgtagtttttacctatagaagttaatatgggtcttatttaaatcttccatgtctccacctaatagtctcaatattccttctaactttttgaatgtatggacatgaatgtaaggcatgtagaagattgttatagcattgtatataatgtagtagtaagctttggaaaacagcctaaatgtacaacaatagaggaatggctaaatatgacaatctatattataaaataataggcagaaagcaaagagaatcaagcaatactgcatgttctgatatgtaaagagctccaaaatgtattgctaagtgaaaaaaagttgcagaacaaatagatacagaattattctcatgttaaaaaatacataacatacatatacacacacaaaacaatattattttctatgaacacaatggtagatagaccctatgatgactcccagtgatccttaatttctagtattcatccttttatattgttcccactcatactgattaggacagacctgtgtaatcaaaagaattgttgcagaattgatggtgtgtgactttcaaggctaggtcacaaaagacatttttgtttctgctatgctttcttgagccacttgtgctagtggaagccagctaccacattgtgagtgtactcaagcagacctaataagtcatatttcttagtatttttagtatgattgtgtctcacacaatatctgggatatactaatactaaaatgtatttgttatttatctgaaatgcaaatttagctgcctattccatatttttatttgctaaatatggcaaccttagatggagagaaactgaggtttgccaatgcccaatgactgtctctttatccatgtgagtggaatgtttggaaagtcccagtcaagccatcaaatgattgcagcccctgcattctttttatttatttatttagttagttatttgagatggagtcttgctctgtcatctaggctggagtgcagtggtgcagtctcagctcactgcaacctctgcctctggggttcaagcagttcttctgcctc[134 bp omitted]cagcttcccaaagtgctgggattacaggcgtgagtcactgtgcctggcctattatttatttctttgagacaggatctcactgtgttgcccaggccggagcatagtggcgtgatcatcgttcactgcaacctcaaacttctgggcccaggcaatcttcctgcctcagcctcctgagtagctaggactacagctgtgcactgccatgcccaaataatttttaaattttttttatagagatggggtcccactatgttgcctaggctggtctcaaactcctggcctcaagcaatcctcctgccttggcctctcaaaatgctgggattacaggcataagccaccatgcctggctccctgccaacatcttgactgcaacttcataagacagaaccactcagctaaaccactctggaattcttgacccccccagatattgtgtgaaatagtaaatatttatcattgttttaagccactaagttttggagtaatttcttatgcagcaatagataactaacacaggtacgtatgcacttaaatacatgcacaaagagagatttggataaactttaatcctctgggaagggattgactttaggggttggagtttagggcaacctaatctatctatctatctatctatctatctatctatctatctatctatctatctagagaatgtaattatgaggaaggaaaaatacatgctatccaaatattaacaatgtctgtcaactgatgtatggataaacaagtgtggtattccatacaatggagtattgttcagccacaaaaatgcttacaatacaatacagcatttcatgcttataactgttcatgcttataacatagatgattgttgaaaacatggaaagtgaaagaggccagaataaaacaccacataaaacctgtgagataataaatgtttcttgctttaagccactacattttggggtaattcgttacatagtgatatgtaaccaatacggtgggtttgtaaatactggtgtgaataaaggagtatagagaaatgtctagcacataacaggacaccataataaatgttggctggtatgagtggaaaagatgtgtccagtcccagagattatcccttgtgggagacccgggacaaggaggagaagggcacaagggtacgacctcagcactcacgccagctggacagagccgcctcaggtcaccctctgcctgttctggaggaagaggacatgaaacacacaaacactccctcaccccttaatctacatcttctcctcttagggtaccatcaccttgtccatagcatagagttatgtaaatactagttatacaatatgtaactagtatataactagtaactatttatgtagccgatacatagtaattcagtagctgatatttccagttgcccgtcttctacagggaaccgtctctttgcctcaaagcaaacagcccccagccctgcctgcagggaaggcctgggtatgagagaagggattacctttctcctgctctgcttctgtgctgggagtgaaccccttccctgttctctagggagagggcttcttcccattcagaggaaaacatgtctgtgactcctgtcccttcctcaagggaaggaaatatgaccagtgtgtctccagtctgtgtgcacaatccttttaatgggaaaaaattcccaaggactcctggtgttgaccagtcaattttgttgtaatattacttaagtatgtaaccatgtataactatatgcatatagctcttatgtgactataaaactcaaagcaaatttacaaactaaatacaaacagaattgcaaaacctgtaaaattcaaatgaaaaaacacaaatgtatttttttctttttgtatctaagtcacacctcctgccagtaatgagcacctgtcagccagagcacaggttctccctggacatgctgtgctggggcatgccaggtgggccactcacttcttcccacagttttccttgatttgaacccttacaaatcttcccttctaacaacacatcttggggtcatttggtttccacgtggtgtgagcacatcatttaggtatcaggtctatctctgtgtgtgtgtgtgttttccctcctcattagctctgaataattaaagtagccaaagccacaggtaaataaatacaaatggggccactggaactgggaggcagctctttgttttaagatggccatagacagagtatcagtctgccacccaggctggagtgcagtggcgtgatctcggctcactgcaacctctgcctcctggattcaagcaaattctcctgcctcagcctcctgagtagctgggattacaggcacctgccaacatgcccggctactttttgtatttttagtagagacggggcttcaccat[139 bp omitted]taatttattttagtgattcttatacccccaagaacacctgagttaaaaataaactggtataggagaaaagcagttgtctctgacgtggtggccctcactttctgctctgttccttagcagaggattaaaggaaatgaaagtgtgtctatgaaagtgcttgccaaactatcaagcacaatcaaaatgtaaactcttacgcttagaaggaagggtacaaagtaatttgaagtcacattgtcacttggccagatcccttgtggcagcctcagttttctcatctggaaagtaggaataaaaactattacctcgaggactaagtgatgacataggcaaaagcactttatgaatttagcaaatgtttagggagctcctcccttgggccaggcacatggcttttcttcctttctctctctgggcctcatttttcatctaggaattgcagcgtttgggctgagggctctctttgttcctgccactctgacttagcctttaggtttctgtctgcagttataattcaatcaatcaatcaatgcaaacttactgatcatcagtcaggtgccctgtgctgtgaaggccacagagaagcagaaatcaaataaacatttaccagctttgtacttttatcatcttgaaaattagagtccctggggtttttgttgttgtttacttttattttattttattattttattatttatttatttttgagatggagctcgccccgtcacccaggctggagtgcagtggtgcaatctcggcttgctgcaacctccgactcccaggttcgagtgattctcctgcctcagtctcccgtgtagctgggattacaggtgccagccaccacacccggctaatttttatatttttagtagagacgagatttcgccatattggccaggcttgtctcaaactcctgacttcaggtgatctgcctgcctcggcctcccaaagtgctaggattacaggcgtgagccactgcgcctggcctatttttattttttatttttatttttactttgagacagagtcttgccctgtcacccaggtgggagtgcagtggcgtgatctcagctcactgcaacctctgccacctgggttcaagaaattatcctgcctcagcctcctgagtagctgggattacaggcgcacgccaccacacccggctaatttttgtatttttaatagagacggggtttcaccatgtttgtcaggctggtctcgaactcatgacctcaggtgatccaacctgccttggcctcccaaagtgctgggattgcaggcgtgagccactgtgtctggttacctatttttatttttaatgttttttttaattgacaagtaaatattgtatgtatttatggtgtgcaccatgatgttctgacatatgtatacattggggaaggagccctagtcttgaaaagaagtgtcgtaaagcagctcgtgcctggcacttttcagtaatgtttagtttcgtcccagcaaagtcccaattcatttcatggtacctttggttgtttgtcactacagtgtaaagttctggaaagagcgatccatattgtaatcccctttgtgttcacactgcccagcgcaacgttttgggcacaggtgctcaaccattaagttttgaacgaatgtagttgaactctcatggagaagcagcaccatcttctggctgaagtgggtaatgctgcacagggccagagagcggctcaattagaggctggcaatcagaggctggcaatggatgcgcgcgtgtgtgcgtgtgagcgtgtgtacatgtgtattcaagtggagatgaatgcactctttcctcaactttgccatcctctactatcagagttttagcctgaggatggttgaggcatcctggcctctagagcgagaagtttgctttagggaaaacctaatctgaattcacccgtctgcaatgcggcgaatcaggcccagagaagttaaggctggctcagggtcaccctgcaaggtggtggcagggccaggctggagtcttcactcctgactcttcatccaggactctcagaattccagggaccactttcctcctgaatgctgaagtttttgccttcctaaagccataatctttgtagtggatgtagaactcgggaaaagtcatttggttattaatggttgcagacagggagcaaagatggcaagttgaaggaaaaagcatttatttattgaacatgctatgtgccaggtactctgtatgtacagactaccatttgtacaatggagataataatagcagctctttcagagcattgttgtaaataaagtaatataaatgtagtaatatatgtaaaatgcttacatatacttaaagttgctggaatatcacgagcactcatatgttttagtttctacgtcagttagcttttcttggatgcaattatttggaaacagtctgatccttttaggtcttgcttttgttagggacctccagaggagtgttctgtctaggaccaattattccccactattgaggcatggccttcctgcatattctactcaattccagtctagctggaggcagcgggcactgtttctggctctgtgtgagtcctgggcactgttctctcctcctttcagaaggacctcgggtggtttcatcacacgcacgagctgatgagtacactgctgaatacttgaggggcaccctctgcacatctctgaggctctctgtgcagctctctcctccccagtactctgtcctaagaactctggccaccttgatctcctgggactctgctgtgtctcctcaactcagaagctccctggctccacctgggttccctttgtctgtactgtggcctggaaacatttttctaggctgtgagctggggttgtcgtggagttcatgtggttttcccatctctcgcatcaccatcctttgtgatccacccaatgtccagattcttgcctggttattctagctgtttcatgcaggaagataaatcaggttcctgttacttcatcttgggcaaagcctaagcccatcaattgattttacagctttaaacagcagccatctatttactcacgattggcaggttggtgatttgggctgagcagttctgctggccatggctgggctcactcctgggcctgcagtcagcctcatgtcagcgaggtggctctgtttcctgggcatttgctggctgttgactggagtgaagaaagcaactgggccatgtgtctctcctcctccagcaggctagcctgggcttgtgggttcctagagcataagagagcaagcccctgtgatgagcacttttcacgtctattctagaatcacttttgctattgtccctttgtccaaagacaatgatccacccagatccaaggggttgagaaatggacttcacctcttgatgggaggaactaggaggtcccactgcaggggcataggtacaggtaggcaagaatgcatagccatttttgccatgcctatcatagctattcctattcctttgtaagcctcacaagaagccaggaggttgatcttattatcgacaatttacggaagagaaaactgaggctcagagaggttgagagacttgcataagatctcacagctagtaggaagcaaagccaggatttggaccagggtctgcctgcctctgagcctggtgtggtgtgtgtgtgtgattctgtattcaacaccatcaactgtttatccttggccctggtccctgatgtgaggcactccctgaagctgcccatgctccagatccttcctgacactctcccactcccaaccccaaacagaaggccatggccctgggcccctcctgtcagtgcctgtggggcctgtggacactgaaggagatgtctgtgtgtcagtgtctctgtgtaggggagctcacggggctgatgacctatgtccccagctagcgtgttcctcagtgggtcgtgagttccttcctctctatgctcctctgttactcctgcctgggctgtttcaaaagcctcctcacctccctggcttccctgtccccatccctccctcgggttgaagccaggtgggcccttgagggtccacgcttgatggcagtgctcttccatcctcggtccttcagtggcttctgatttttttcctagataaacactaaattcattttcccagcacccagtccttccacgatctcaccctaacctacttttgtgctttatttctgaacacccatgctaatgtcctccgttattgagtcaagggcaccatggctttgtccccctgggctggcccctgggtggtccttccctccatctccacacacccactcctcctgcctcctgcaccacccacctgcgctccaggctgtgtgtgatgtctgatcatttcattcaggccccaacttcctgagagggcggactgtcttatttgtgtttgaccaactgagaaagcccaggcctgggaggggattgggaggactctctggctttgtgtggtactctcagcccagtgagaggcacgggagccttcctgggacctcctgctattctagcccaagattggtgctgcaacgaagcaactggacccctgtggctgaatagcaccctgtggactccgtagatatgtccactgctcctcgtgaccttgggggaggggagagagtgcccataaaggctaagtgtgtatgcaccagtggggtagcagagaagttggggcaggccatgaagtggtgtggaggggctcagaccaggggccagtgaggggcactgcttttggttggggtagtcaccaatgctgctcactgaacatttcttttcccctccaggcacgcattgaggtaggtggaccacgcacttaccttgactaatggaatgtggatgagtgacgtctgtcacatctaggtgggagctgtaagaacccatgctgaattgccacaacccctacccaccaagatgaatgaagtctcattaacctgggttcccaagggatgaagataagcagatccaactgccctcccatgcccaacatgagatttggggttcatttgttacagtgacataacgaacccatcctgaaggtacacttgaagagggcaggatttcagaagttgaaggaagtggagagaaagccttagtggatttcctggcacatgtgtcggcctcagagaaggcctggagggaaggggaggggtctgggaagacagagactacttttggctctctgcctctctccagttgaccctagttcttgggatttggggatggtaacactgatgtttccccataatgcaaccatgctccatctccccagacctggattagaatcttggcttggccatgcactggctttagccttgggcaactcaccttagctctgttatgattcaggttccttgtctgtaaaagggattggagagcacctatcttgaggatttgaggtaacacatataaaacactcttcttttcatgtggtggacactcactagctggctgctgatttttattctttttcttctcaatctactattcccagtggtggggtggggagtgggagagatggactacagccatctgagaccaccctccccactcacctcactttgctcagctggcctgagctattgatgttgccaagacaatgatgacatgtggaccatccccaaaagatgctgtggtctgtgatcagaccctttggtctgcctgagtgtgagtgtgtgtgtacacacacacatgcatgcacaggcagccaaagtcagaaaaaacaatggcctgaaattagcaaaaaaaaaaaaattgtttctggaaaaatttgcaccaactgcttgggaatctgaagataaaggcaggcacaggccaagtcagagatcaatgggcctaaagcaagtaatggcaatgatgatgatggtgatagtgatggtgatggtgataatgatggtgataatggtgatagtgatggtgtcagtgatggtgatgatggtgatggtgacagtgatgatggtgatgatggtgatgctgccgatgatggtgatgctggtgatagtgatggtgatgatggtgatagtgacggcgatgatgatagtgatgacggtgatggtgacagtgacagtgatggtgatgatgatggtggtgatggtgatgtgacagtgatggtgatgatgatggtgatggttacagtgatgatgatggtgaggatgatggtaactacatttgttgagctccagcagatggatgtaatggttcagagccggtctctgatgtcagcaaaccctgggtttgaatcctcttctgtttctccaggacttgagaggcatattggttaacctctcagttactctttggtaaatgtggaaatagtagtccttaccttttaggcttgtgaagatgaaacgagataacatgtgaattctcagcttggagcccagtatacagcagcactcagtatgtggcgaattttgttaggacaatattactcttgggctaggtactgtgctgagcacttcacatacatctccccaaaaggctgtcatgatagtattaggatcctcattttgcagctgaggaaacagagaacagagcctgcatagcatcccaaagtcacttagcttctaagtaaaaaccagaatttgaaccctggttgatcttactccaaagccttagccttaggtataaaggcttgtggtaggtttttcatgatagcaaaatattaaaaatataattaccaccagtaggggattggttaaacaagttacaggacatcctcacaatacacacagttgcaaacaaagtatttaggaagattttcaagatatgttaagagaaagaacacagtatagaacagtgtacagtatattactatttctataaaagagggtgattaatatataaatgtatgtgtttgtttatatatgcacaggacacacaagaaaccaatgacattagttgcctatcaggaagggaactaggtggcagggtgacatggatgggagggatactttactatgtaccttttttttttttagatgaagtttcactctgtcacccaagctggagtgcagtggcacgaacttggatcactgcaacctccgcctcccagattccagtgattctcctgcctcagcctcccgagtagctgggattacagccgtgcaccaccacgcccagctaatttttgtatttttagtagagatggggtttcaccatgttggccagggtggtctcgaactcctgatcttgtgatccacccaccttggcttcccaaagtgctgggattacaggcacgagccaccatgcctggctactacccttttatatttttgtgtgtgtggagatgtgtgtgtgttttttgtggttcagagctgatctgtaaattaatatgtaaataattaacgtgatttcactgacttcattttttatcaccctcccccactctcagtccctacagcttgggttcttgtgttcctcaaacattcattccagcccagggcctttaaacttgattttctccatgagaccctcttcccctgatccttgcctttccttcaccacattcaagtctctgcccagatgccatccttcagaaaggcctttcctgaccatgtgacccgaaataaccaccactgttcattgttgctttattttctttacatcactatgcactgtctcaaattatattattctgtttttctgtgtatttacttgtttcttttctatttcccccactagaatgtaagttccagtaggacgaagatttttttctgttatatatcttagtgtatgatacatgatagatgcttaataaatatttgctggtggaattaatgagcagataagcataacctttctctgtgatatttatcacagataaatatgttaatttattaatcagttaattgaacatatatttatcgaatgtctaacatattataaaacagtcaaaagtccccatcctcatggggcttttattcttattgattgagtcatttatttactgacacacaactacaagccaggctctatgctaggtacttcagaagagacaatgacaaaaagcaggtgtttttcctttaagacatttgtacttgtttaaggaatagggatgggagtgggagtaggagtgggaaaagatttggttgcacagtacaaaatctgaaacgttaggtgccgtagggctgggaatgaagacaggggaagaaagaccttatttgcattctctgatgtcttaggctctagggagagtgatggaaatgggagtaggagtggggaaagatttggttgcacagtacaaaatctgagatggtgctgtagggctgggaatgaagacgagggagaaagaccttatttgcattctctgatgtcttagactctagggagagtgacagaaatcagaagagaagaagaagtgttgatggacaaacaagtggtccagaattttaacagaagaaaacaggaaaaattgtattagactttactttctaccagagatgcaggcaggaagcagccctatgtagcgcctactgtcatactcataagacaccagctacacaccatgaaacagggacctcagtcacaaaacatcctgtctgaaaggttcatgcatgtcacacaataggggcttaaataaatatttgttgggtgaattgagcacataagtgcaaccctttgctgtaataaatttgttaattaattgaacaaaaatttattcagtgcctactatgtgatattttgtggggaggagttttctaagcccgacttggaggaagaccatggatttaacctgcaaggtgtccactgccagccttgacgggcccttctggaggaacttgcagggtgaggtgagcgttgggagcttttttaggtgtctgtagccatgtgctactgtccatggtcctgaaacaccaccattgctctttaggacacgaattcttcttctagcacaagaacattggtgacttgtgtccagcatctttcaaaaatcctgaaacaggtaaggaagaagaaggtagaggaatataggatatgcgggtgggaagagaatacacagaggctcttagaaaggcacagccccaagagagtgtcagggagttctttggctttgaaatattaatatgtattcacttccaccatgaaggaaaccaccctagacctagaacacggccaagacactgtaaagctgaagaatagggagaaatttctgcatgaggctaagcaaaggtgactatgaacaatattgggacggcaatatcaagatggctcaagtgaaatactagttattatatcaaagagttcataataaaattaagccatatggagaattttacatatttattacatactcattatataatatgtataatatataaattacatattttatgtcatatataatacattgtatatattttatatgtaatgataatatacactatatgtaatattcctcataacatattcattataaaattaagccatatggaaaagtttaaagaagaaacaaaccacccagttctgtcactctgaaatatgatagttcaggccgggcgtggtggctcacgcctgtaatcccagcattttgggaggctgaggcaggcggatcacaaggtcaggagttcgagaccagcctgaccaacatggagaaactctgtctttactaaaaatacaaaaattagctgggcgtggtggcgcacgcctgtaatcccagctactcaggaggctgaggcaggagaatctcttgaacccaggaggcagaggttgcagtgagctgagatcgtgccactgcactctaacctgggcaacagagcgagactccacctcagaaaaaaaatatgatagttcatcaaatctaggttttgattatacttcaaatcattttttgtatcactaaaaaaaacctaccaattaaaccataacaaaatgctttacataatctagagtttttattaaaagaactgttttaaacttgtataaatatatattttatagcatgttactcatatacaaacataaacaaaaaatataagaaataaattggtccaatatatttctaaaacaccttcacatttagcgttcaactcttctgaatcaccttttggctcagtcgttgtgtgtgtgtgtgtgtttgtgtgtgtgtgtgtgtgtgtgtgtgtgtgtgaatacaatatcctttgtgcatcaagagtatcaatgatgcagcatttcttaaaagagtgctcagcttcacgcctgcaatcctaggccttgggaggccaaggcgggcggatcatgaggtcaggagatcaataccatcctggctaacactgtgaaaccctgtctctactaaaaatacaacaaattacccaggtgtggtggtgggcgcctgtaatcccagctactcgggaggctgaggcaggagaatcacttgaacccgggaggcagaggttgcagtgagccgagatcacaccactgcactccagcctgggcaacaagagcgaaactccgtttcaaaaaaaaacaaaaaaacaaaaacgagtgctcagctattgtctctggactttatttccaaggcactgcttggagttttgatgctggaacttgcttgatcttaccagaagatgtcagcaatgacaactacttcatggctgccacctggctgtcagccattgtgtggtcactagatttcagagttgtttatatgtgaaaaaaaaaaaatcagtattttagaatgggtgaagacagtaactggtaaacattatttcaaatatctttctgtgcttataaacaacaagaagaataaatggatagaaagagaaagttttacataaggttagacaaaaatgattttgtaaaaattaatcactacattttatcaaaaatgcaaattaagcttctgaaattttaatgaaattcaacagaagaaaaataaattgaagtagatctgaaggaatggctataatttaaataatgtttccaccccaggagatattaattactaaaaggattcttataagggtaaggacaagtggttataaaaaccataaaatcataaagaggttggagtcattgatttttcaaacctcacacatttcgatttcagacagtattgattgatcccccgctataaaaggtgagatggttagcacagttacacttcctccctcctccctttgccaatctcccaattttgttgcttatgttgatttttctcttgttgggatttatattatttatattctgttttgtaattgtaattcctagcatttataattagtgtgtaaagctgacttcccaatctttttgcactgtcttcattttttttttttttttgagacaagagtttcgctcttgttgtccacgctggagtgcaatggcgcaatctcagctcactgcaacctccatctcccaggttcaagcgattctcctgcctcagcctcccaagtagctgggattacagacatgcaccaccaagcctggctaattttgtgttttttttttagtagagatggggtttct[145 bp omitted]tcaaagtaagacatgcacatagtttaaaaagtcaagttttaccacttggccctaaatgaaaaattgcatttctctgctccctattttcacttatccaaacctcacagctctgagggagtaatccctaccttttacaacgatctcctttgttgtcatgttcacagcccccaaacagtgacttcttgctatggcagctgagcttttcgatgatttactagacctctcctaacacacatatacatacactcagcatcctctcatcctccacatataattatcaccacttttcattaaatcaagatccagtgcagaggcctgccaacatatgtgacagctgtactggatcattttttatcacctaggaggtgataaaaatataataatcatgaaataaaacaaatatgtaatagtaaggaaaagaaacagtgaaccttttttattgaacttcatataactaataacagtaaaaaataaaaaatgaatattgcagtactaaaaaaggaaaagcaatcatcctaatattgcgtcttttttagtgtaggtgccttggatgcaccagcttgtaattttttagctttttcagtaactttatgtaatgttgaaggtattatacatttcaagatagagccatacattgcttttttacattttttccttactgaagtccactggattaatattgtttcatgttagtatgggtacctcacttcaagtttctttataaaattcagagtaattacaaactgaatcagttgctggtttcacaacaatattacaaatgaccgcaagttcttccaagctcctgcaggacaaaaagcacaactatttatcaaagaattcttatatctatgtaacagaatttttgtctttagttacaatctgatatattaatattttaggttagtaattgttcaataactattaagtgatctttaaaaataaaacaaatgtctccaaagggtaccatttaggaaagtactaataataacactaattatacattacatttttctggattcattctttagttttaaaaactaataattaatggccgggcgcggtggctcacgcttgtaatctcagcactttgggaggccgaggccggtggatcatgaggtcaggagatagagatcaccctggctaacgtggtaaaaccccgtctctactaaaaatataaaaaaattagctgggcatggtggcgggcgcctgtagtcccagctactcgggaggctgaggcaggagaatggcgtgaacccgggaggcggaggttgcagtgagccgagatcccaccactgcactcccagagcgagactccgtctcaaaccaaacaaaaaaaaacaaacaaaaaaacctaataattaaaaaaaaagaataaattttaggccaggcacagtggctcacccctccagcactttaggaggccgaggcaggtggatcacctgaggtcagggattcgagaccagcctgaccaacatggcgaaatcctatctctactaaaaatacaaaaatcagctgggtgtggtagcgggtgcctgtggtagcgggttccagctactcaggaggccgaagcaggagagttgcttgaacccgggaggcggaggttgcagtgagctgagatggcaccattgcactccagcctgggcaacaagagcgaaactccgtctcaaaaaaatttttttaaaattatttaaattaagtaaagcatatcatatatgaacaaaaactggcatttaccaaccaaaaatattatattgtacctttttgtttgcactgtttcattatttttaaactccaagtgatttgcacagaatgacaagatgaagtaactcaagttctgtttctttgtcgttacaatactgtgcttgaattatttttaatctactgtttaaaagcaggaatgtgtggtaccacaggggtagagacataaactgcactagaaatgaacctgaacaatgattctgaactattataagtttactctcaaacaattgcctgtagctgaatctgtgtgtgttgaagatggaatgtacaactgggagttgctcaattagctttcatgtaaaacataaaatgtttattaaaggataaataataagaatgtgttcatttgaagcttgcaaatataatgttaaagctcaacagtaatttcagaaattatttataaattataaattagacaaacaaaaaattttcagtggggggaaagaagaattttataattgacactatttagaattgctagtgcacagtgacaatgaaaaccacactgacttctagttttgtgatagttttaaagttaccctcagtaatgcacttcttattgccagcgcttgaggcagaccgctctcaccatccatctttggtatgccattggttcggcgtttatattatcaaggtaatgcaattaatattgatagttgagtcataaactgtactataattacattccaacttttttacttcctgaagttaataattgcctctttttttgtttgtgttgttttctatacactagttcattctgaaattttccaccagaactgaaaatcttctttgaatttttgttcagacaccccaaatgatctatcaattctgcttttctcttgatatcagtcctctgggagcagtacatcatcctaccacaaactggacaggttacttcttaaacacattgtcttcctggaagcagttatcttcctggcacttctcttcaccactgcctaagaagtttccatcattttccttttgtgttgattctcacgtctggatcccgtgttttccttctttattctcttcatcatgccgtcacaaaagcacatctttcagtagcttttggagaaagggtgtgtgggaggtaaatttttaaaacctggcatatctgaaaatatctttgcctttacagctttatgttttcattttaattttgaattaacattcagtaaagttgactttgtagacaattttataattttttttttttgagatgaggtcttgctctgtcactggagtgcagtagaatgatcacagctcactgcagccttgacctcccaggctcaagcgatcatcccacctcagcctcccaagtcactgggaggctgccaccacacctggctaatgaaaacagttttttaaattttggtagagacagggtctcagtatgttgtccaggctggtctcaaactcctggactccagcaatcctcctgccttggcctcccaaagtgctaggattacagatgtaagctaccgtgactggtcacagttttatgaattttaacacacgttgatttaggtaagcaccacaagatacagaagagtttcattacctccgaaaactccctcatgctacccctttgtaatcacactgtccttcccatccctaagtcttggcaaccacacatctgttctctatcactataggcttgtctttttgagaatgtcatatcaatggaatcatacagcatgtaacattttaggactaacttctttcattcaataatgcctttgagattcatctaagtggttgcatgtatcaacagttcattgctttttctcactgaggaatgttaggtttatctatttaccactgaaggacatggggttgtttccagttgtttattgttgttttggaaattataaatggagccattacaactatttatttacaggttttggtgcgaatataagcttttaagttttctagggtaaatacctaagaattgttgtcatattataaagtgtatttaactttataagactgccaaactgttttccagagtggcaatatcattttgtaatcccaccagcaatgtcagagttctagttgcttctcatcctagtaagcacttggtattgtcagtattttaatatttttaagtatgtgtggggggggtgtttgtttgtttgtttgttttttgagacatagtctcactgtgtcacccaggctggagtgcagtggcgcgatctcggctcactgcatttccgccccccgagttcaagcaattctactgcctcagcctcccatgtagctggaattacaggtacaggtgtgtgccatcacattcagctaatttttgtacttgtagtagagtcttgtcattatgaactggtcttgaactcctggcctcaagtgatctgcccgccttggcctcccaaagtgctgggattataggtgtgagccaccgtgcccggccaaacttttatttatttagtttaatttttacttacttatttatttgtttgagacggagtatcactctgtcacccaggcgggagtgcagtggcgtgatctcagttcaccgcaacctccgcctcctgggttcaagagattctcctgcctcagcctcccgagtagctgggattacaggtgtttgccaccacacctggctaattgttgtaattttagtagagacggggtttcaccatggtggcgcggctggtcttgaactcctgacttcaaataatccacccatctcagcctcccaaaatgtcgcaattacaggcatgagccactatgcgtggacttttaaacctctctttctttataaattacccagtcttgggtatttcttcacagcaatatgaaaatggactaatacaccttttatttctttttattaccttaattaactggctgagaattccagtatgttgttgaataggagtaatgagagtaaccatccttgcttttttcaatcctcacagcatcttacacatgaatgtttatccagggatctttagatatttgaggaaaccatctgaaaaacaggtcaatgggagtcgttatattattccctcactcttttatttttctctttttctctctttctttctttctctctctctttctttctttcttctttcttttcctttccttccttcctttctctttctttattgcttttctttctctctttctttctctttccttctttctctctctctctctctctctctctagatagggtctcactctgttatgcaggctgaagtgcagtggtgtaatcatagatcactgcagcctcaaactcatgggcttaagtgatccttccaccctagcctccccagcagctgggactacaggcatacaccaccaggcctggctgaaggtatttcttaattttcctttagcatccagtttgttcttgattaatctgaagctgttatgcttcttgttattttgtgggtgggtgacctattccttatctctggagactttaaggacctcgtttttattcttaatgttttgaaattttatgaaaaagtgcttagtgtggattaaatttcttctgatgatgtttttcagtctgagagacttttatttctttgataattttttcacctttttagttgccattcttttgggaattcctactgaaataatttctaagcctcttatgtattttcttcagttgcttacctaattttttattctacattcagaagagatttcctcaacttgattttccaatccctctgttgaagttttaatttctgtaaacatatttgaattcccaaaagctctttttttgttctctagtttttaaatataattccattcttaatttataggtattatatcttcttgcttctctctaaagatactaattacatgaactaaagggttttttgtaaaggtttcttacattctctgtatcatttttgttttcttctcattcatttttctatttattttgtttttgctttttaatgttgaaagcctttcttaaatgcctggttatctttggttgcctttatccatttaggaggaaggcactaaaattagattagaacttctatatataggcagagctcttatgctgatggacttcactttaggggagcaggtggaaaattggcaattcactggaggaccccaaagtgccaatatattgaggcctgtttttctggggttgctgtttctccagagggggaaaagtattggtttcctgtctttaagttagatgctagagttttgcactggattaagaaagaagatgaaattcagttttcttttagtcagggaagttcccacctatgtccttctatcatttacattacctacacttgagtctgtgaccctgatattacaaaaacttttctgtacaagacagacttgcaacattctcaagggtctcctgcttttggcgtatcacattcattcctgttgtcaggtactttaccataacatggtggacattgcaagttgtctactcagcagtcatgcctaattccttcttccttgcctgattcctgctaaattacctgaaaaagctaagtattcatgttcccagaccatttagcagctagtagtagtcatgtgataaatccagtaattaccagtaagacataggggcatccactggggagtttgggggaaagatttattctccatgattaaaggcaagagatgaaggaagacactgcccacactactttcctcacttctagtattgaatgaaattgcatgaggacatatatgatgatcgaagccacggaaaccatcttggaccatgagggaaaaaaaacaagagcatcacagattcactgaactggtattgtgatctcatcaagtcactgggtcacagctggctcattggctttgatcctctgaatttacctaattattttttttaatcttccttcttctttttagttaaatattctgtcttgttttctatttctccccttgtcttctctcatcctttcagatctttaaagagtctgaagcttggatggaaacacagacaaagttataggcccttacctgttctcattaggtcttttctgaaacaagatgagatatgaataagcaaatgggctgctccccctatgtccaatagagatgtccaaatgagatgtctgtcatctttcttcttctttgctgccatagaggtcttcatctgactaatacaacatgggaccaagctttattc[138 bp omitted]gttctcatgaaggaactcacagattatttgtagagtgatgggataaacactggagaaggggtcagaaagcctcgatttctgaccttcacctgcataatgtcctcccctggttcctcatgtctcttacaggaatgaatgtgatacaccaaaagcaggagacccttgagaatgttgcaagtctgtcttgtacagaaaagtttttgtaatatcagggtcacagactcaagtgtaggtaatgtacatgataaatacagataaaatctgtatttattaacctagttcctcaaagctctgcataatcttctccctgcctgctctgtaccctcagctcccaccagctcccctgtgctccagccttacggaggctctccaggttcctggattataaagtgtatgctcagaggtacaaggaggagctggtaccattccttctgaaactattcaaatcaatagaaaaagagggaatcctccctaactcattttatgaggccagcatcatcctaataccaaagcctggcagagacacaacaaaaaaagagaattttagaccaatatccctgatgaacatcgatgcaaaaatcctcaataaaatactggcaaactgaatccagcagcacatcaaaaagcttatccaccatgatcaagtgggcttcatccctgggatgcaaggctggttcaacatacacaaatcaataaacataatccagcatataaacagaaccaatgacaaaaactacatgattatctcaatagatgcagaaaaggcctttgaaaaaattcaacaaacttcatgctaaaaactctcaataaattaggtattgatgggatttttctcaaactaataagagctatctatgacaaacccacagccaatatcatactgaatgggcaaaaactggaagcattccctttgaaaactggcacaagacagggatgccctctctcaccactcctattcaacgtagtgttggaagtgctggccagggcaatcaggcaggagaaggaaataaagggtattcaattaggaaaagaggaagtcaaattgtccatatttgcagatgacatgattgtatatctagaaaaccccatcgtctcagccccaaatctccttaagctgataggcaacttcagcaaagtctcaggatacaaaatcaatgtgcaaaaatcacaagcattcttatacaccaataacagacaaacagagagccaaatcatgagtgaactcccattcacaattgcttcaaagagaataaaatagctaggaatccaacttacaagggacatgaaggacctcttcaaggagaagtacaaaccactgctcaatgaaataaaagaggatacaaacaaatggaagaacattccatgctcatgggcaggaagaatcaatatcatgaaaatggccatactgcccaaggtaatttatacattcagtgccatccccatcaagctaccaacgactttcttcatagaattggaaaaaactactttaaagttcatatggaaccaaaaaagagcccgcattgccaagccaatcctaagccaaaagaacaaagctggaggcatcacgctacctgacttcaaactatactacaaggctacagtaaccaaaacagcatggtactggtaccaaaacagagatatagaccaatggaacagaacagagccctcagaaataatgccacctatctacaaccatctgacctttgacaaacctgacaaaaagaagtaatggggaaaggattccctatttaataaatggtgctgggaaaactggctagccatatgtagaaagctgaaactggatctcttccttacaccttatacaaaaattaattcacgatggattaaagacttaaatgttagacctaaaaccataaaaaccctagaagaaaacctaggcaatactattcaggacataagcatgggcaagaacttcatgtctaaaataccaaaagcaatggcaacaaaagccaaaattgacaaatgggatctaattaaactaaagagcttctgcacagcaaaagaaactaccatcagagtgaacaggcaacctacagaatgggagaaaatttttgcaatctactcatctgacaaagggctaatatccagaatctacaatgaactcaaaccaatttacaagaaaaaaacaaccccatcaaaaagtgggcaaaggatatgaacagacacttctcaaaagaagacatttatgcagccaaaagacacatgaaagaaatgctcatcatcactggccatcagagaaatgcaaatcaaaaccacaatgagataccatctcacactagttagaatggtgatcattaaaaagtcaggaaacaacaggtgctggagaggatgtggagaaataggaacacttttacactgttggtgggagtgtaaactagttcaagcattgtggaaatcagtgtggcgattcctcagggatctagaagtagaaatatcatttgacccagccatcccattactgggtatatacccaaaggattataaaacatgcttctataaagacacatgcacacgtatgtttatttcggcactattcacaatagcaaaaacttggaaccaacccaaatgtccaacaatgatagactggattaagaaaatgtggcacatatacaccatggaatactatgcagccataaaaaatgatgcgttcatgtcctttgtagggacatggatgaagctggaaaccatcattctcagcaaactatcgcaaggacaaaaaaccaaacagcgcatgttctcactcataggtgggaattgaacaatgagaacatatggacacaggaaggggaacataacacaccagggcctgttgtggggtggggggaggagggagggataacattaggagatacacctaatgttaaataacgagttaatggatgcagcacaccaacatggcacatgtatacatatgtaacgaacctgcacgttgtgcacatgtaccctaaaacttaaagtataattaaaaataaaataaaatataaagtgtatgctgggccatttcatctctgagcctctgttcttcctgccagaaacacacttctccctcctttgtctgcctaacacacttgaacttctcctttcttcaaatgacaccgtatctaggaaggcttcccctgtctcccgagcatggctaattgctcagccctttagcctttgagcattcttctaggtgaggcatttctatctttagtgcgtttatgtgtttctgggtctctctctccaaccaaaccgtgagttctctgagagtagaatggatgtcttgtttttgaatccccagcattgagcatagaggtatatctggtcatgcctcttgctgctctcctactcttcaagaaattaaattttaaagtattgattccatctttaacaaacatttgcataatatccacaatgggccaggtatgatacaccaaaaacaataaataacattgtaatcaacttgtaaaatagagaaagaagacaacccatcttcatcccacatcccttaacaaatttgttgttgagatctgggtatttacttccagtatatttgagcagaacaacttttaaagtggttcctatgagcctcattagcttcagcagccatggctgtctactgtgttgccattaaaagtttgcaggccccaagagaggtggacgagccagcctagacctcccttgggacttgaccttccactggggcacagcagtgagtcagtttccagtggggattgtcagcaaagtaaataacctctcatttgaatattttctattttccaaactccaacatcagcattagcacatttgatctcatctataattcttactgtgtccattttgtggatgaaatggagagacttggcaagggttgatggaaagagcattatgatagtcctgtgtgtaagacccaactatgccattaaccaatctcatgactgggaacaagttatatcacgtctccaggcaccagtttctgcatatgtaaaagtagagaactggattagatgacctcttaaggctccatagagtttcaaacatctaagattttatgcctgctcaaggttacttggcttgtttgtggcagaaccatggcaagaattgaggttttattccatcactcggcaaataatctgtgagttcctccatgagaactcttttcagcagaatgagtgcatgccatgacctctacctctttctctctgttcattgttggaatagaaagactttgctaaagaggtagaataagaagggagccagatgggaggagagggtagatgaaaacaaacaaacatggttgaaacattttgcacttaaatctgggtcataaggaagaatgatccagggcataagtgatgatcttggggaaagtgaccaggtcactttttttttttttgagacagagtcttgctctgttgcccaggctggaatgcagtggtgtgatcttggctcattgcaacctccacctcccagattcaagcgattcttctgccttagcctcctgagcctgagtagctaggattataggcatgcgccaccatgcctggctaattattatatttttagtagagacagggtttcaccatgttggcttgactggtctcaaatcctgacctcaggtgatctgcccgcctcagcctccaaaagtgctgcgattacaggcgtgagccactgcgcccagccaccaagtcacttttaagagcatttttgatgaggagggaataaaacttggtctcgtattgtattagtccattcttgaattgctatacaacataccagaggctgggaaatttataaagaaaagagatttaattagctcacagttctgcaggctgtactggaagcatggtagtagcatctgctcggcttctgccaagggcctcagagagcttgcaatcatagtggaaggtgaagtgggagccagcatctcacaaggtaagagcaggagcaagagagagagaggaggggaggtcccagatttttaaacaaccagatctcctgtcaactgagtgagaactcacttattaccaaggggatggtgccaaactgctcatgagggattcgcccccttgttccaatccccttctgccatgatccaatcgtctccaacattgggaatcacatttcaacatgagatttggaggggacacatatccaaaccatgtcacatattcaccttgacagaaggcagctttctaaaaagtgagataaggctgggcataatggctcatgcctataatcccagcattttgggagactgaggcaggaagactgctcgagcccaggagttagagaccagccttggtaacatagtgagacctgtccttacacacacacacacacacacacacacacgaataaataaaaatgaagcaggaagattgcttgagccaaggaggttgaggctgcaataagccatgatcatgccactgcattcctgcctgggcaacaagagtgatactgtctacaaaaaaaagagtgagataaaagtaagtctgattccataagcagagacgtctctggaagagaatgtatgggaaggagacaggagaggcacctaaccaaaggcagatacaagagctttgagaacctgttaaatagcctcaaggttaaagttggaatcagctgagcctttgaataaggaaaagtaatctggaacaattacccagggaagctgagagaccacagagctcttgagatcctgttaactcccacttacgccagcaagaagagggtgacaaagtaggaaagggaagggaacacacacacacacgtgcatgcaagcacacactcacagaggggagacctggagagatgaggagatgttgagttcatatcaccaggaggcccagaagcatcatctcccaggtgagaggcagtggcatgatcatagcttactacagcctcaaactcctggactcaagcgatcttcccacctcagccgcctgaatagctgaggctacaggtgctcaccaccacactggttaattttttaattttttgaggagatggggtcttaacatgttgctcaggctggtctcaaagttctgggcttaagctacccttctgcctctgccttccaacgtgatgagattacaggtgtaagccactgctcctggcccagttctgctgatctgtcttcgagttcactgactcttcctctgtcatccccattttgctattaaacctcttcagtaaatttttaatttccattattgtatttttcagttctaaaatctctacctggtttatttttgcagctttcatttctttgctgagagctgctatctttcaatgtttcaagggtgtttagttctgcctcatccagcatggttgtaatagctactactaagcctttggtaattttaaaatcagcattatgtcaggtttttttgattgtcttttctcttacaatttgttggagttttcctgtttttctcttttaatgttgcataattttggattgtgtcttggaatattatattgtgagactttgaatcctgtcagtgtcctctggagtgctgattttgtttgtttgttttagctgtcagttaaccctgttaaatcctgacctgccttgagtgaggtgtgtggttccgacgtccacactttctgaagcctttgcaatgccgctcgggtctgcatcatgcgtgtgccacctaggggccagtctgggacccaggtggtggtttacaccatatttcagttcccaaagccttcgtgatgttgcttcaagtcatttctacccatgcacggatttaaggacccctttctatggctgcctcctttctatgctttactccatacagtctggctcctaggggccgctttttctggtgctctggctacaaagctggggttttagcttccctttactgtcacaaacttttcatgactgggtctgtctcagggcaaattggtgaaagtaaagagagagaaaatatattatggacttcccccaccccccacagggtctcagcaggtagctatggaaggaaaaacaaaaatcagagaactcaccaccatattggttacattaaagtgttgacttccttcctcaaactgctgttactttccagagttctttagtttttatttacaataggtgggagaaattgggtggaatcttagaacccctaggttacagcattgatttgtttggtggttatacctttctggtgtgatctcattgtccttgtgtcttagtccatttgggctgctataacaaagcaccttagattgggtaatttaaaacgacataaatttattggccatggttctggaggctgggaaacagagactctctgaaagaaaatgaaaggtaagagacacggtgaaagggtaagacagctctctggggcctcttttataagggcatcgctatggtttgaatgcgtcccctccaaaattcaggtgttgccaacgtgacagtataaaaagataggacctttaagaggtggttaggccatgagagcgcctccttcgtgaatgggctcaggtgtccttataaaggggcttgataggggaaattgatttctttcttaccttctgccttccatcatgagaggacacagtaagaaggctctcaccagatgctggtgccttgatctgggacttctcagcctccagaactgtgagaattaaatttctgtgtttttaaaaataaactatcctatctcaggtattctgttatagcagcataaaatgaattaagagaggtattaatttcactcatggaggtggagcgctgatgacctaatcacattccaaaagccccatcttctaacaccatcaactttgtgattaggtttcgacatatgaatttagggggaacacaaacattcagaccacagtatcttcagaaattattctgctctttagtcttttagtccttgtaacaactttgtacaaaattttccctccatatttttttgcggctcattttcatgtgaaagtagttttactaaacttttagaaggggacatgattcacacatttccctcttcagttgtttttatgtagtattcaaaaatatgactgggtgctgtcccatgtgcccgtagtcctagctactgggaaggcttagacaggaggattgcttgaacccaggagtttgagactagcctgggcaacatacagcaagaccccatctcaaacaaaacaaaaaagtatggtgacttgctttctgatatttttctagctctatccgcctcaccatttttaatgtataccttctatttgtaccttctttgtcttgatagtccgtctctgaatcaattttaatcctccctcttcagtgcggagtttgtgctgaaaggaggctctggcttatcagttttgagaatttctgtgacttagactcctccagtccttcagtttcaacacctggctactcatcctccactgaatttggaagaaccagtccctgtttcagctaccatttttgaattggcctgccatgcgtttcagaggatacctgttggctattttttattttcttctttttggatgcgtcaggcaccctgttgcttcccgctgcttcttccacagatgttggtaccaccgagtaagattttgtgcatggatcttctccactttcttgttggggcccatggggttaccttgttacttagttttattgtaaatgctgcccatatattttaattttgctatttactcctctgctggttttttctattttaattctttagttctagagattgtggaattgacgttgagaaagcttaagtggttttctaaaggttatacagttttttgtttttgtttttgtttttgttttgttttgagacagactcctgccctgtctcccaggctggagtgcagtggcatgatcttggctcactgcaacctccacctcctaggttcaagcaattctcatgcctcagcctcccaagtagctgggactacaggtgcctgccaccatgcctgactaattttctgtatttttaggagaaacgggatttcgccatagtgcccaggctggtctcgaactcctgagctcaggcaatctgcctgcctcagcctcccaaagtgctaggattacaaacgtgaacaaccgcacccagccagtcatactgtttatttgtagtggagctgatacttgcacacataccttctgaatcctggtccagtgtctgttgttgttgttgttgttgttgctgttgttaattgaaatttttattgaaataattatagattgacctgctgttgtaagacataatagagacttcttgtatactttgcctaattttctcaaatggtaactatcttagttcattttccgttgcttgtgacagaatacccaaaactggataattcataaagaaaaggattttcttacagataggaaaacttgagaagtctaaggttgagaggccatatctggtgagagccttcttgctgttggggactctgaggagtcctgaggtggcacagggtatcacatggtaaggggactgagtatgctagcctgctaggtcaggtctctcttcttctttttttaaagccaccagttctcttcccatgataacccattaatccactcgcctattaatccttgaatggattaatccattcatgggggcataattctcatgatccaatcaccttttaaaggcccaaccttttaatactgccacattggggattaagtttctaacacatgaaattaggggaacatgttaaaaccatagccgtgatattttattaaattgcagtgtaagattacacccagaacattgctgctttgctattttaacatgggaattctgggataataagagactatactgatgccaccactattatgtccctaaaataatcccagggaaatttgatgcagaaggataaacaataaaatgaatcccagtaaaggctgagaactccaaagataacgacaggcttttaggacatgcagaagaatcaaaccacctttaaggacaaaaacaagactggatttatgcctccaacaataacatttaatttttttttttttttttttttttttgcaaaaaggtcttgctctgtcacccaggctggagtgcagtcacgcaatcatagttcactgcagccttgaactcttgggctcaagtgaccctccctcttcagcctcctgagtagctggaactaaagaagcactccagcacaactggctaagattttttattttgtagagatggcagtggcgggcggggggggtctcactatgttgcccaggctggtcttgaactcctggcctcaagcgatccttcccacctctgcctcccaaagtgtagggattacatgactgggccactatgcctggccaaccattaatattataagacaatgagacaatatctatattgtcctcagaaaaagagggtgttatactatgcttacatccaggcaaactaccattcaaaaataaaggaaacaggtattttaaaatatgcaaggacgtagagaatatattcccagtcaactcctttgaagaaaatacagggaacaaacttcagtctatcaaaagataaataagagactatgccaaaagtattgatgctgagcattaaacctatttaaagtagacttaaagtcaaacacgtgaagaaattttggtttccaaatataatgtaaatgttacaaaccagaaagaggtagaattagtaaaagttggaagtagaaaagaaaatgagaagtaatctaagcatactaatttcttccttttgcattgtttaaagctaatgaatcaagtaatggaggtatgagtttaacttacattttataaataattaatagtaccactagaccaactaacaaaagttgtacaaacaactaaagttagggaataaaacagaggagagggaagggagctgagaaagggaacattctaattttttaatattttaatatggatagtcaatagatactgtctcagttgataatacatatatctgcttataagtagataagaaaacataaaaagaaaaattttttgtaaaaaataaaatgcaaaagaatcgttaaaactagagaattttcattaaataagatgatagaagtaaaaccagttataagagaaaaatagacaaatctacaatcatggtaggaaattaaaagaggtctctttcagctactgataggatgagagaaataaacaaacaagaaggatatgaaagatttgagcaatacaattaacaaatttgacctaattagcatttatagaacactgcatccagacatcaaaatcattttcaaatgcacaagatacatttaccaaaatagacaggccagaaatcaaatttcaacaaattcaaaaactgaaatcataccaagtgtgtcctttgaccacagtggaattaattagaaatctaaaacataaagatagctagtgggatgacaacatggaagataactgaagcaactattttagaactctgaagtctagtcaaacacttgcagaattctggaaagtgctttattaaaaaaaaagaattagtccctctccctctccctctccctctcccatggtctccctctccctctctttccacggtctccctccccctccctcttcctctccctctccctctccctctccctctccccaccgtctccctctccctctctttccacggtctccctctgatgccgagccgaagctggactgtactgctgccatctcggctcactgcaacctccctgcctgattctcctgcctcagcctgcctagtgcctgcgattgcaggcgcgcgccgccacgcgtaactggttttcgtgtttttctggtggagatggggtttcgctgtgttggctgggctggtctccagctcctaaccgcgagtgatccaccagcctcggcctcccgaggtgccgggattgcagacggagtctcgttcactcagtgctcaatggtgcccaggctggagtgcagaggcgtgatctcggctcactacaacctccacctcccagcagcctgccttggcctcccaaagtgccgagattgcagcctctgcccggccgccaccccatctgggaagtgaggagcgtctctgcctggccgcccatcgtctgggatgtgaggagcccctctgcctggttgcccagtctggaaagtgaggagcgtctctgcctggccgccatcccatctaagaagtgaggagcatctctgcccggccgcccatcgtctgagatgtggggagcgcctctgccccgccgccccgtctgggatgtgaggagcacctctgcccggctgcgaccccgtctgggaggtgaggagcgtctctgcccggccgcgaccccatctgggaggtgaagagcgtctctgcccggccgccccgtctgagaagtgaggagcccctccgcctggcagccaccccgtctgggaagtgaggagcgtctccgctcggcagccaccccgtccgggagggaggtgggggtcagccccccgcccggccagccgccccatctgggagggaggtggggggggtcagccccccgcctggccggccgccccatcctggggggaggtggggggtcagccccctgccccgctggcagccccgtccgggaggtgaggggcgcctctgcccagccgcccctactgggaagtgaagagcccctctgcccggccagccgccccgtccgggagggaggtgggggggggtcagccccccaccctgccagccaccacgtccgggaggtgaggggctcctctgcccggccacccctgctgggaagtgaggagcccctctgcccggccaccaccctgtctgggaggtgtacccaacagctcattgagaacaggccatgatgacaatggcggttttgtggaatagaaaggggggaaaggtggggaaaagattgagaaatcggatagttgccgtgtctgtgtagaaagaagtagacatgggagacttttcattttgttctgtactaagaaaaattcttctgccttgggatcctgttgatctgtgaccttacccccaaccctgtgctctctgaaacatgtgctgtgtccactcagggttaaatggtttaagggcagtgcaagatgtgctttgttaaacagatgcttgaaggcagcatgcttcttaagagtcatcaccactccctaatctcaagtacccacggacacaaacactgcggaaggccgcagggtcctctgcctaggaaaaccagagacctttgttcacttgtttatctgctgaccttccctccactattgtcctatgaccctgccaaatccccctctgcgagaaacacccaagaatgatcaattaaaaaaaaataataaaataaataaataaaacaattaaaaataaaattaaatagtcaaaaaaaaagagttagataaattttagtaaattttttggtttttaatgaatggctaccctcaccatccctaccctgatggcaggcagctatggggatggcagcctgcactgttggtgtgacttgcttttgtcagggtgggtaataaaaacattgctctccagaacttggggttgtacattttgattgctgttttttatcactgaggggacagaacaaaggctggccattgttttaatccccatgggctgaagtcgcttctctagtgacactggttggagggaatggaaaaacagacactgttttttttttttttctccttttcttatcttattggatccaggcatttaaggaaatctctgtaaggtcactggttgactatggaaataatgggacagagacttcagtgaccaataaagaggcaaaaataataaaaatgaaccagccaggcacagcacaagacaaggaatatggtctttgcaagatagtttggaaaaattaccaaagaaatggatgactgtggccttcatcaagtaacaacagcaatctctgcaaatggatttccagcattaccacatacaatattcaaaatgtccagttatcaacaaaaatttacaaagcatacaagaaaataggaaaatatggctcatttagaggggaaaaacagaaatcgacagaaatcatccttgagggagcccagacattgagttttctagacaaagacttcaaatcaattgtcttaaacatgctcaaataagcagaaggaaaccatggaaatgaactacgtgaaatcagaggaacaaatatgaacaagtaggtaataccaataaagaggcagaaataatcaaaatgagccagccaggcacagtggctcatgcttgtaatcccagcactttggaaggttgaggcgggaggattgcttgaggccaggatttgagaccagcctgggcaacatagcaagaccccctctttacaaaaatttaaaatttagccaggcatgatggcacacacctatagttcttgttattgaggaaagagatgaaaagatcacttgaacccaggagtttgaggttataggttagagtgagctatgattgcaccactgtactcctgcttgggtaacagagtgagaccctgtctcacaaaaaaaaggaacaaaatagaaaatctggagctgaaaaacataatagctgaaattaaatatgtattacagaggttcaataggatatttgatcaggcagaagaaagaattagtgaactcgaagataggacaaatgatattacccagtctgaggaggagacaaaatgaagaaaaatgaacaaagcccagagacctatggagagtcaccaggcacactaacatacacattctgagagtcccagaagaagaagagaaaaaaggggcaaaaaaattttttgaagaaatagtggccaaaaacttcccaaatttgataaaagacatgaatctacacatccaagattaatgaattccaaatagcataaactcagagatccacactaggatcactataatcaaattctcaaaagacaaagggagaatcttgaaaggagccagagagaagtgactcatcacattcaagggattctcaatagaattaacatccagtttctcatgagaaatcatggaggccaaaatgcagtgggatgatatatttaaagtgctgaaagaaaaaaaaaaactgtcaaccaagaattctatctttcaaaaatgaaaaagtaagaaacatattctgagacagacaaaagcaagagaagttaattgctaatagacctgccctaggagaagtgctaaagggagccttacaggctgaaacaaaaggataatagatggtaattcaaagccacacaaagtgatcacaccagtgatctttatatctttgtgtgtctttgagttatgtaaatataagtcttttatttatacaggtaaatataaatgctagtagtattgtattttggtatataagtcttctttttgtttcctatgtggtttaaaagacaaatgcataaaataataattataagtttatgttaaaatgcacacatatataaaaaggaatttatgagagtaacaacataaaggtggagggaaggaatgaaatataggcagtgttaatgtatattattgaagctaagttgttatcatactagattcagattagcttcaaattagattgtcataaatttaaggtgttaactgtagtccccatggtaaccactaagaaaataacttaaacaaatacagagaaggaaaaaagagaaaatcaaaatactacacttgaataaagaaagccaaaacacctgaatggaagttttgccttaaataaaggcaatattgcagaattgaggaggaaaaatgtaagacatatagcaaacaaatagcatagcacaatggcagaagcaagtcctttattatcagtaatcacttgaaatacaaatggattaagcttgtcaaaagacagagattgaaagactgtattaaaaaacaacacaatccaattatatgctgcttacaagagacttattttggctccaaagacaaaaataggtttaaaataaaaggatggaaagagatattctgtgcaaatagtagccaaaagaaaactggagcgggatcaataagaaaatacgggacttgaaaaatattataaactgactagacttaaaagagatttacagaacacccaaagacaacagaatgtacatcattctcaagtgcacatgaaacaatcttcaggattgactatacgttaggccataaaaaattttcaataaatattcaaagatttaaattatacaaagtatcttctctgactacaatggaatgaaggaatctacaacaaaggaaaaacttgaaattttgcaaatatgtggaggttaaacaacatactctccaacaacaaatgggccaaagaataaatcagcagtgaaatcagaaaatactttgaagtgaatgcaaacaaaagcacaacatacgcagggtgcagtgaaagcaatacttagaattttatagctgtaaaatcctacataaaaaaggaaaaacgtctcaaatcaattatctaactttacactttaaggaactaaaaaaagaagagcaaactaaaaccaaagccaacagaaggaaaaaaacaatacagattagagcagagataaatgaagtagagaatagaaaaacaatagatacaatcaatgtaaccaaagttagttcttgaaaagataaacaaaatttataaatgtttagctaaactaagaaaaaaagagaagaggcaaataaataaaatcagaaacattactaccaaccttacaaaaattaataggattgtaagagagtactatgagcactatatgccaacaaattggctaatttagattaaatggaaaaattcctggaaacacaaattaccaaaactgatttcaaaagaaatagaaagtctcaacagacctataacaagtaaatgttgaatcagtgtttaaaaaacctcccaaccaagaaaagtccagtaccagatggctttagtggtaaattctgccaaacatttaaaggagtatgaacaccaatactatgcaagttcttgtaaaaaaaaaaaaaaaaaacagaagcaaagggaacactttttaacacattctatgaggccagcattatcttgataccaaagccagacaaagatacaagaaaagaactacagaccatattctttataaatacaaatgcgaaaattatgagatgccacttcactctcactattctaagtaagatggttattcctcaaaagattaggcacagttgctataaaatccagcaattccacatctagctatataccaaagaaaaatgaaagaatacatccacacaaaatcctatacatgaatattcctagcagctttattcataatagctaaaaagtggaaagaactcaaatgtccgagagctgactgactgatttacaaaagtggtatatccatatgatgtaatattatccagtcataaaaaggaatgactggtacatgactagtactggtacatgctacagtacagatgaaacttaaaaacataagtgaaagaagcaggacacaaaagccatatatcatcatatgtgtgttatatgattcaatttttaggaaatgtccagaacaggcaaatccagagacaaaaagtagattagtggtttccagagactgaggagagaacagaatgggcagtgactgctaaaggatatgagatttcttttcagaacgaagaaaatgttctggaattaggtagtggtgatggttacacaagtttgtgaatatactaaaaaccactgaatggttaaaatcatttaataattgtgaagcttatggtagttgaattatatcttgaggatgaacttagccaatttacattgagagttcactttggctgagagaagagcagatcagagattgggataagagatggtaccttaatgactgtacatatgaaaaaggctttggagtttatagagggggtgacctggactgtgtcctaggacataactcacttttccaactacagtggtgataggagagggtggaggccttgcactgcccatggtgctgagggatttggttcttgtaaacctccctgggaattcacgtctctttagggttcttatccttcttcatcttggtcctttgatcagtaactctgaaatgttggccccaagacagtctcccaataattatgtgcatctgatgcaacatctcacatactttttaataactcccattgctcatttgcccttagcagcctgagccaggctttatcttatgaattaagcctaagttttactccccaaggaatttccctttccttaaggccaatcccatatgtgttccttgtctgagagaggccaggagaagaatggagctacaggagaagagtgacctgggagatgggaggctctaagtcctcttggccactgtgggctggaggaaggtgatggcctcattgtccttcccatggacaaatcagcacgacaaagcctatcgtgagacaagcatggggtggagggaaggcatgggggaagtcatcaggcattaatgcaaggggaacgggatttgggaaacattgattttatctaacattaagacttttgtctgtattggcttatgtgctgggtggaatttagaacagagggtgggagggagagcggaatatagacatacactgttatctcccccgcctcccacatacatactacagcttcttcccacacctaggagaaaacacaaacaggtcttgctctgacactttccaccctctactgttcctttttaagtctcatcttcctccatcttcccccttctcctgcctgcttctctcactcactccagattttcttcccttctttattgctgtccctccatcttatcctctcttttcttaaatcttgtgtttaacaatacctgttaatgctccctggatgacaacagactagattctaccccattttgggaacccacttattccttctcccctcgtctctcctagtcctgtgtgggctgattttctaagagcaaagacagatgggagagaagattgagtaacaacagaagaggtctagaatcctcccctttccccatacagatccatgtccctccctatgtctattttctttcttgtctagaatccctctaaatctattttctatgcatgtagggggaggaagcatttgcaaagattctgatgggtttgtggaaagaatcgggccatgctaagatgatgcttctaggattgtaaatctggtgatgctgggaattaggattcttggattctctttgaggtcctataaactgcattctatccagtggctactctctctttcttcccagctctcacggcagtctggcccatcccagcaccctgtcctccattaagcaatcacacattcttttgggaaccaactatgagaaagggtctgtgtgtaccacgtactgtgtaatacttaacatattggatttgcactgaaattacaacacatgtgaggaacagagccatcctcatgaaaaaataccaaggcatagcaacattatggaagagctaattactcttgaaccttgaaggaagggtagaattcagacaggtgaacaggacagaaaagcaattcagatgcggcactgactggatgaaggcactgagacctgagggaccgaagaagagataagtttggctgaagctgaatcttcttagaggagagcaggtaagaggagaatagtcattaggagtgcaaattctgggtcaatcagacctggctcagaatcccagctctgcttcttcttctccatgtgatctgggagaaattagttaacctattcaagccacagtttacttatctgtaaagtggagataatttatggtacttactatacttataaacatgggaataatatgtgagaattaaaaaagataatgccagcaaaatatttagtatagtgtctatcacatagtaagcattcaaaaaatgtttactacgatgacaattactgctattacaacaataaatgcttactaccacagttattaccattactacaattacaataaatgcttactactactactattaagtggcagatggacctggaaagaaaggtaggagcctgtttgtgtggaagcccctgaaatcctaactaagtacaaattccttcctgtagacaataaagagccatggaaaatttttgaaaaccttttgaaatagagggggaagatgttgttgaagaagtttatgtatgtactatgttgcacagtgtggattaaaatggaccaaaacctggaggcaagaacccacttggaggcccacagcaataagccagataggaaaaataatttggcagtaatttcaaaggaagaacgaatatgccttggtgataatacatgtggagttcaagggagaagtctagctgggtgaggggataacagacagaaataggagagccagagaggtatttgggtttagagtaaagaagtagcaagaatgatttcataataatgacaggcagctcacagtgccagatggagctgaaagaacccacggttactgacgggctttagccattacagtgacactcaaactgaagaactggttatgaggaggggaggaatccagcggttctgcaacagtcctgggaatcacggtctccttctctcctctcttttacagaagagctttcccttttcccacactgcgtctcctcctctttttctctctctcccttttcctcagtgttctgaggtttctccttccccgaacccttccccttgcacacctgcggttgtctttcgccccgacagtgctcatgctaagaagtttttcagctcttaccttttctttttcttggtctcattataatacttcttttgctttttttgattaaaattttatgacaatttataaattacaagaaataaaaaaaattttgtaaagaagagaaaatatatgttccatcaatcccatcaaccagagataaccactattcacactggtaacattttggttttccatgtccattttttccctttatatttatactatagtttatcaaaatattttgtaattctctctttaaaacaacaatactttgagtcttaaaacccctcatggataattttagagataatcctgtctatatttgtctgtaaaggttgatgaagatcttttttttcttcaacttttattttaagttcaggggtacatgtgcaggatgtgcaggtttgttacataggtaaacatgtgccatggtggtttgctgcacaggtcatcccatcacctaagtattaagcccagcatccattagctattcctcctgatgctctccctcccctcgcctcccccctgacgggccccagtgtgtgttttttcccctcacgtgtccgtgtgttctcatcgttcagctcccacttgtaagtgagaacactctgtgtttggttttctgttcctgtgttagtttgctgaggataatggcttccagctccaaccaggtccccgcaaaggacatgatcaatagagctatcttttcacatgtatccattcaattcccttataagagcatcagtgcaatcactgctgcccctcccatggtaaaatcaaatcccatagagttaaacatccttttaggatatatttattcttaactagtatttcatcccatggaggaaccatattttatttaaccaatatcttatagtcatgcatttatgttgtttctagtttatcaatattataataatgtgatgaatatccttaagcatacatttttaaaaattagttttcattgtttctttaaaacaaatccctaagacagaaattactgggtcagggagtataaataatttatggatttggcacatattttcaaattgtcttctagaaagattgtactaccagtgatttatctattgctctaaattctcaataatgctgagtattacaagtttttaaaagatcaatgttaacataatttttaaaaattgttccttattatattttatctttaactttttggataattagtaaattctagatacatttgaattattattatattattacaggtgcttgccaccacgcctagctaatttttgtattttcagtagagatggggtttcaccacgttggccaggctgctctcgaactcctgacctcaggtgatctggccgcctcggcctctcaaaatgccgggattaacgcatgagccactgcacgcagccatgttattttattttaaaatcccttccttccatcatgatttatacatagttcattcaaagtaaaaatacccaaataatacaaagacatcaggatcaaaactagagtatctctgaggcttttcatcttatgttttatcatggaaatttgtatatatttacaaagtagagagaatcaccattttcagaattaccactattaccaacagtttgccagtcttgcttcacatactcctctcacctttaataaagtattttaaggcaagaccaagacatcttttctttacatccataaaaacttcagtgttcatctctgactgataaaagcatataaaaatgtatgggggtggtaggctgggtgcagtggctcacacctgtgatcccagcactttgggaggcagaagcaggtggattgcttgagctcaggagtttgaaaccagcaggggcaacatgacagaccctgtctctactaaaaatacaaaaaaatagccaggcatggtgaagtgtgcttgtggtcccagctacttagggggctgaggtgggaggattgcttgagactggctcctggaggttgtagtgaactgagattgcaccactgcaggccagccttggggacagagcgagaccctgtctgaaaaaaagaaaaagtatggtggttgtaatcttaatagggataaagatcttaagataaaataatgaagtatgctgttaacatttcaggaatcagtaatcaggtgtgagagttggagttggggatgaaggattagggtcaggggctttcccagagaggccaaaccatgccatttaaatggctgcccacccagtctaaccttgacaccatgtggtggagaaaggacacaaaatcagagaccaaaatgtgttaccctctgttgtggttgctgcgacaatgctccaggaagggtgtgtactacccttgcctgtctcagcttcctgccctggtgcactgggataagcccattctaaccctgttttaccacatcatttcctgctgaagagcttgccggggttctcagttgcctatggggacatttttcaaacagtcctaggctgggagttggtgaagccacagaacaaacacagcacatcttcctggaatatcatttttgcacaaatatctgaggataaatgtgaattttatgtgaagaataatatgacaatattttgagtactgaaatccctcataagttttgagataatcctgttacatttgtccatagaggtttatagagatctttccaaatatattcatccaattcccacgtaacagcatcagtgtaattgctgctaccctacccatgtgccaggtgggaatcagggaaaatagacctttttatgttctattgtctgtacaggatggggccttgggacaaatttttctgaacaattagagaaaatacttgtggaaaggtataatccaaaagaatgggttttaacaccaagaactcagtttatttttcaagctaatgtcttctaaaactttcacttactaaagaatcatgtctcccttcatgctctaattttctttttctttttagagataagatcagctggagtgcagtggccataatagctcactgcagccttgatctcctgggctcaagcaatccttccacctcagcctcctgaataactgagactacaggtatgcactaccatgcccaggtaacttttaaaatttttgtagagatgtgatctcactatgttgcccaggcttgtctcaaactcctggcctcaagtgatcctcccacctcagcctcccaaatggctggggattacagctgcatgccatcacacctgggtaatttttaaattttttttatagaggtaggggtctagctatgttgcccaggctggtctcaaactcctggcctcaagtgatcctcttgccttggcttcccaaagtagtgggattataggcatgagccactgcatccagccaaccctcttttttttttttttttttttaaacaacactttggtcttgtcaaagttttaagaccataatagttacattttaaaagctctcccaaagattgtcgagggatatgtgtataatagaaaattcgcataaattttagaagttaaaacatgagagttcaaggagatagtgcatttgtcctgggcttctttgaattgcccccacagatggcccatggcaacaaatgctactacagaagtacttacagggaaacatttgagaaacactaatcatcccagcttcgctacaaccaagattatctgcttatttttcttcacatttacctctgattttgtacataacaattttcttctaatgcacacctctctttctccagcaataaacatcctctcaaattcccaccataaagaagcatctgtttgtttatctaaaatcattattctcaactgtatatcctatcaagatttatgcacataggttgatggtgtttgtggtcacaggtacttgctgatatgtttatttattcactgattgattcaactagctttatggaacctatggttcacaaggcactatgttgggcatagcaggtatgaaaaagaatcagacatgaaacctgtggttgaggacagcatggccgaagggaaaaaagacccagattcttgtaatatactgtagggcgtggtcagggaagtaagtctctggaacccttgaaaacatatggaacttcctccccgtggagggctttcctaagctacatctcggattgacactcaacaactcaacttaatcaactcaatcctgactgtccaaggaaaatgattgaattttcattttttttgtttgtttgtttgtttcaatggtttctctgtaggaacgtgggggaagatcctatggaaccacagaacaccacacaggtatcaatgtttgtcctcttagggttttcacagacccaagagctccagaaattcctgttccttctgttcctgttagtctatgttaccaccattgtgggaaacctccttatcatggtcacagtgacttttgactgccggctccacacacccatgtattttctgctccgaaatctagctctcatagacctctgctattccacagtcacctctccaaagatgctggtggacttcctccatgagaccaagacgatctcctaccagggctgcatggcccagatcttcttcttccaccttttgggaggtgggactgtcttttttctctcagtcatggcctatgaccgctacatagccatctcccagcccctccggtatgtcaccatcatgaacactcaattgtgtgtgggcctggtagtagccgcctgggtggggggctttgtccactccattgtccaactggctctgatacttccactgcccttctgtggccccaatatcctagataacttctactgtgatgttccccaagtactgagacttgcctgcactgatacctccctcctggagttcctcatgatctccaacagtgggctgctagttatcatctggttcctcctccttctgatctcttatactgtcatcctggtgatgctgaggtcccactcgggaaaggcaaggaggaaggcagcttccacctgcaccacccacatcatcgtggtgtccatgatcttcattccctgtatctatatctatacctggcccttcaccccattcctcatggacaaggctgtgtccatcagctacacagtcatgacccccatgctcaaccccatgatctacaccctgagaaaccaggacatgaaagcagccatgaggagattaggcaagtgcctagtaatttgcagggagtaaactttaagtaagttgactttaaatgacaaatttctctggatttttattttcccacatgaaaaatggaggaaagtctttataaagcataacaaatcagattacacttatatttcttgaggacctagtgctgtgtcaagtactgtgttaagcacttccacgctttttttctttttttttttttttagatggagccttgctctgtcacccaggctggagtgcagtggtgcagtctaggctcactgcaacctccacctcccgggttcaatgattctcctgcctcagcctcccgcgcagctgggattacaggcacccaccaccacgcccggctaatttttgtattcttagtagagatggggtttcacta[137 bp omitted]ccgacagtagatatattattattgttgttaaacagttttacaaatgagaaaacgcagagagaagtgacttgctcaaaggtgaacagtaagtgagtggcagagcttgccctggaacctggttcttcttgactccaagtttagaggcaagaaataggaatgggatttgaaactcaagagtttcctgcgaccacaagagaaaacctagagaggtcttcgtctatagagaagtatctctgatgaatggtcaactgcttcatcttaactctgggacagttacattcttttctgctccccacctccctgcctcattccccactgtggaatttagaaagttatctcgccctccctcctcccccacaaaaaaagtttgagtcgccgctgcgggttgctagcggagtcgcgcgtcgggagctacgtagggcagggaaggcatggcttctgttttcgtccaatgagaaggggccagcggtggcggtcgggccaggtccggggcctggggacgccgaggcggccgcggaggagcgccgcgtcaaggtctccagcctgccctacagtgtggatgcgctcgtgtcggacaagaagccgcccaaggaggcatccccagtgccggccaaaagcgcctcttccggggccaccctgcggctactgctgctgccggggcacggcgctcgggaagcgcacagccccgggccgctgatcaagcccttcgagaccgcctcggtcaagtgggaaaactccctaagacggagcggcgtggatgcaggaaccctgctgataattcgccgccgccaagacacgtgagccctaccacctgcaccctgagaaaacacaagaccaatccgaagccgcgcacagcctttaccacgtcccagctcctcgctctggagggcaagttgctccagaaacagtacctctccattgcagagggtgcggacttctccagctctccgaacctcacggagactcaggtcaaaatcttgttccagaaccgaagggccaagacgaaaagactgcaggagtcagaactggaaaagctgaaaatggctgcaaaacctatgctaccctccagcttcagtctccctttccccatcagctcgcccctgcaggcagcgtccatatacgcagcatcctacccgttccatagacctgtgcttcccatcccgcccgtgggactctatgccacgccagtgggatatggcatgtaccacctgtcctaaggaagaccagatcaatagactccatgatggatgtttgtttcaaagggtttcctctccctctccaagaaggcaggaccagccaatactcctgttctgcaaaccctgagtgcaccaccctaagcggctaggccggcagggccacacgacacagctgaagtttgttctttaggcggaggcaccaagccttgttttcttggtgtaatcttccaggtgcccccttctcctttcacaaagattggctctgatggtttttatgtataaatatatatataataaaatataatacatttgtatacagtagatgtaaaaattcaaattattttaaaaggcaaaatttatatacatatgtgcttttttcctatatgtcaccttcttaaagagactgtgtaagtccatttgttgtgttttcttaaagagggagacaaattatttgcaaaacttgctaaagtcaatgattttgatgggatgattgacttctgcttatggaaaacaaatattagaattggacataatgcacatagaaagtattagatatggagaggtttttcaaagtgaaggggacacatcacatttctgcattttacttgcattaaaagaaacctttttatatactaccatatttgttcctatctctccccacgcccaccccccccccacacacacatttttacagttttacctttttgaagaattttttttttgtaagaccaataaccgggatgagaagaatcctgagaatgcctggaggtgaggtagaaaattagaaatacttcctaattcttctcaaggctgttgctttacttcatttcagataattggagagtaaaaagttaaagcctgttgggaggagttgatggtttctgagaaatactaggtactttcatcctcacagattgcaaagattatttgggtgggggggtacagtaattttctgcttaaaaaatgagtaccttgtaaccattacctgtatgctaaatattcttgaacaattggtagatccagaaagaaaaaaaattatgctttctctgtgtgtgtacctgctgtatatgctaaacttattagaaaattttatatactttttaacatgtccagggcagaagataaagccatgttttgacttggtgaaaatggagttgccaaacagcccattaagctccctggtatttcaccttcctctccatctctcccatccctccagtatgcctttacccctttgaaagggtgccttgtacaattgtatatattttattgaagagttattatatcttattctgaattaaattaaacatgttttattgcaaaaaaaagaagagaaagttatctcacttttagcattgtctaaatagttccccaaaaggcatttgccctttgtttttgttccatctttactaaatactctttggataatcttcacattgtgctacttagctgaaatggcttaaatatggccccttcaaaattcaggtattgaaatttaatgttcagtgtgatggtgttaagaggcgaagcctttaagaggtgattaggccatgaggattcctcccttattaatgggattaaggcctttataaaagagacttcatgcagcattaggctcgctagccctttggtcttctgccatatgaggacacagcattcctcccctctggaggatgcagcaacaaggtgccatcttggaagcagagaatagccctcaccagacaaccaaacctgttggaaccttaatcttggactgtccagcctccagaactgcaaaagaataaatttctgttctttacaaatcatgcagtctgtggtgtttcactataatcatacaaacagactaagacattacccaacacaatctttccctcatttgtatagtatggctgagaggaggatggcataacataattgaggaaccaaggccagagaggccagggccatgcttaccagtgttccaaatctagggtagtgaattcatttccaaggctactacttcatgtgtgtttctgcttttctctttaactggaatgagagcttcttgagggcaggcgccatgcattattcatttttaaatcctcccagctcctgaacagtacctgacagagagaggaagcatttttacttttatctttttttaacatttttccagcttcctatagtttccctctgtcaatttctgtatatttatttcttccatcttccttggggtatgcatcattttgtaaaagtctcaggcaatgtataatatggacccaaagttaagaagatgatgcagaagctttttgttcccccttc[141 bp omitted]tgaaaccccatctctactaaaaatacaaaacattagccaggcgtggtggtggatgcctgtaatcccagctactcgggaggctgaggcaggagaatcgcttgaacccaggaagcggaggttgcagtgagccgagatcgtgccactgcactccagcctgggcaacaagagtgaaactccgcctcaaaaaaaaaaaaaaaaagaagatgaagaaagaaaaaaaaaaagaaatggaagtcagaggctcttcctggtttctcttgaagccatcatggcaactctgaacttatcctttctccacttcttcctccttgtttccgtttcacacatttctccacatttacactcaacctttggaaatgaggaagggtaaaatggactctctgtcttatttgatctctgtggccccttagaacagcattttcctctttcacattaaaatcctttaaatatcaaatgatgcttttcacatcctccaatttgtctcttctccacgtgcaacatctgccttcctatagttgttcctcttgtgacaggtttgctgattctaccagcccgggcatctcttctgtatttactctcatatggcaacatccctcttaaggtgtgatgctcaccatatgatactgctgcactgggctgtaatttctttgagaaaagatgattttctcctctgaaatatatgtccataacaatgcttttagctgcaagtagcagaataatcaagtgacagtggcttcaataaagaagaaagtattatctcatttaaacagaagactaaaggataagcaattccagagttggttaattcagtaatttaaacattttagggctctgggttggctgctctgcaattccttgtctttcctctcatggtagccatacggctgtcaaagctccaggcatcacacctttatttcaagtgattcagcaagaagcataagaaaatgcatccatgtgctttttttttttctttttaccaggggagaaaagaaccacaccagcagaattatcgtatgacccagttgaccagaactgcatcatatggtcaccccagtctgcaaaaaagaatggaagggtgaatgtctggtttcttcagccaggaaaaagagtactgggaatggcaaccaacagtgtctgccacgtatgtctaagcccctggcagcaagaagacagacaattggattgagtgagaaatcttgttgataagaaaactctatcatgggcagtgattataaaatcaaatgcctagagaagctgacaataagttaagtgggcccagtgaacactaaggggaactggaggtgctcatccagataaaagaggaaatcctacttcaagtcttctcttcgaccctaatgcagaattccagtacttaagtctgtacaaaaaaatcggaaggattttacttagagatacaaaacagccccaaataaatagtcccaggctgttttctccagttaacaaaacaggtgacatgataatcctaagagaggccttcaagttctcaagccctactcatgcacatagtgcttccaatcagcatcttagtggtttgattttaaataccagtggttagctggagaccactaggcagatgaagaaaatttccaatatagaaggcagacacaaaagcagaacaaaacggaaaattagagaagtccaagtaaacagaagcaattcaagtaatagaagaaaactttctaagtttttataaatttaactttatattttgaggtaactgcagatttacttgaagttgtaagaaataatagagatctcatgtacactttacccagattctttcaatggtaactgccatatgctaaatgtttatgtctccccaaaactcacgtgttgaaacctaatccccagtggaatggtatttggaggtggggcctttggtagacgattaggtcatgaggcaggggccttatgaatgggattagtgcccttataaaagagtccctggagagctgccttgctcctttgccatgtgaggacagtgagaagacagctgtccataaactagaaagtggaccttgatgagacaccgaatctgccagcatcttgtcttggacttccaagtcttcaaaactgagaaataaatttctgttgtgtataagccacccagtctatggcgtgctgttatagcagtgcaaacaggctaaggcagaaatagcttgcaaaactatagtatgatatcacaaggatattaacattgatacagtcaagacatagaacaggaaagtttttaaaatcctaccattaatatccacaaaagataagtcactgtattcataaaacaagattaggatgctattttagaagggtacaataagaggatgagaaacaaattcttggaaattaaagatatgttttggtatactgtatttttctaagatgaccacatcaatatcttccatttcacatgctcttcattacaatatgaatttcacaaagtgggatctttgtttcctacccttgaatctggaagggcttgtgatcttggtggaagtgtcaccatgtaacctctgaggataggtcgtagaaggcaatacagactccaattagttctctgtggaatgcccactcttggaagcaagctactatgctaggaaaaagcccaagtagccacatagagaggccatttgcatttctattaatatcttgattgaccggcgtttgtccccaggtaggtttttcaagaaagatttatgagaactatattttctgaattaaatatttgaaacaatttatctgttgtttttatatataaatgacaatttcactgaataagcatctttggataatactttttatttttcttaggtctttgtagatgttcttccgttttctagggctattgagaagtttgaagccagccttcttcttatagatggattcatctttttccatggcagcttttaggattctttctttatctttggaattctgtaactttattcagttctgttgtagcatctgttgacatttatcacatttcctggcacacaatctgccttttcaatctattgattccatttatttcattttcaggaacattttcttgaattacatctttggatattttttgctccaattatttatatgtcttcttcaaggacatccaagtattaattaaactgatattctttgtctatatttcatgtacaaacatacacacacacttcttactcatccttttaaacttttgctcttttccatttcattgtgtttagttctcttaagcctgcctttcagatatcttactgtattttaagcagtgactattctcattttcactgtttccatttttttgtgatgattttattttcttcctattcttttttcctgatctctgccagttacgttttccatctctgttttcatattatcattcaattcttaagatttaattattctgctgagctcttaatagatagaagtttgattcatttttttctgagttatctacattcttgaaaaacttttcaataaaaattttcttctctattctgttctgtgctcttcacctgccttctttcctcctttttgacctattttttatagactctgcaagttgctttttaattattacacattcttaaagaagcaatttgtttaactagttatgtgttaaaataaaaagtggtggtgatggtagtgaagacaggccagggagtgctctgggttaattgtcctgggctcacagtgcagcactgaacactgaatgatagaggcatttgtgtgtttgtgtgtgtgtgtgtgtgtgtgtgtgtgcgtgcgtgtaaatttagtctatctcttcagctggtaaagatcagcagctgcaggggtgcccatagcccacagtttctctatcttactggatagtgcagttataaatgtggcataagcccagcctctcaatccctttttggtgtttaatatcacttaaggaagctcttgcagccagcctgtgtgcccggatctggtccatccacacaaaggtggttgttttatcttcattatataccacctacttaggagccaactctgccagcattgtccaggagttgttgtgggcagaagcctctctctcttcacagtacttgatagtccttcatggttcattttgggttttgttgtcatctgagttgtaaacatgtcttaattttattgaaagtggaatttctgttgccagtgaggaagagaaaaataaaaacctttgttttcttataaccagaagtcatttattcatttaattttttaaaagttgtcttgggccactttttagtttataaaaatcttacttttatatgattcagaatatcagttctaaaggtaatatacagcacagaaaagctgcttataatctacaacactgacacaaagggaaggaatataagtaaaatttcttccagatttatcttacacatggttaatccacaacaccaggtgcttaattgaatttgttgaatatgcccccattaaaatgaatatggctatatttatgagaatttatgcctttaagacatctcttactgaggctatgttctctgagagagagagagaggagagagagagagagagagagagagagagataaaggtatttattgcaaggacttggcttacatgattgtgaagctggctaggcaagtacgtaatctgcagggcaggccatcagctgaagttgctgtctacatgcagaattttcctccttcagggaaacctcagttcttctctttagttctttcaactgattgaatcaggcacacccagatgatctaggataacctcctttacttaaagtcaactgattatagacatcaattttatctacaaaataccttcacagcaacacctagattagagtttgattgaataactggaaactatagcctagtcaagttgacacataacacagaccatcacaaagggagaatgattaattatcaatgatgctgggcttcctgcatgagaatttacatgatatttcctctacacgtgtcctgtatccgtttagtggcttgacattataatagtagctaagtctgacaaacatttattttcttagaaatgtgatacatatagaaataattttctcagctcaattttccatgactgagtctttagcataattactccatccaggccattcatacactggcaaccattatactggctagtggttgcagtaaagatgagctttgatggacattttacgacctacctgtacttttgacaggggaaatatataaactggaacctaccaggtctctattactgaaagctaaatcggaatcataaagaattaatccaggtaattcaaaatcacccatctgagagtcaataacattaacaaggcctgtgcccatccccaccatcaatctagactactttcctgagtggctcaattttaaagtagactaaagctccaaataatgggaagaatttgtgttttttttaaattgacatctcttgtatgtgaaagaacgtcacttcgtgttcttatccccagaggcagagtctttattttgccaagtataaacattcgcaatgaaagaactcagaccaacctgagaacctcacgtggatcagagagctgtgagaaatcacacagattttacagcacatcaagcttacagtgttggttaattccaatttttaatcagttcctcataattagaaaatatatgggcttcttgtgccaatccttgtattaaagggagtaataattgacatgtaaataatgctagcactttgtagatggtgtgagtataattgatatgggtagtgaatcaactgtgggggtattggttgacaagatgaagaacaagatttatggggtaattaagttttcattttagtatgcagacattttcccatccatgacgttgcctatgtaaagatcaattcagtttaaaaggagaagaaatcaaaccagttaccttgacaacaccatgaaagagaactatccattgtgctgaagagcaagtcgttggttctcaatgtctggtccctggaacaggtgcatcagcattatctgagaacttgctacaaatgcaaattcttggtcttaccattgatgtactgaatgagaaattctgggctgggaacagaagtctgccttttaacaaggccttcaggtaattctctcaagggtaggtgtcactggtctaagaaagaaattctcctaaaactctcagagtctccttttttttgaagaccctcttgtccttttggatcttggcctgaatattacccattcctcaaatctctaaaattttcaatgtgcttggtactttgggccccccaaggaagacctctcaaagagtgtgtgcttttgagacatttagaaactttttaacaactcccattgctcccttggccccagtgataatcagcccagctcagcttcctgagccctgtccaatagtttctcccaaaggatattcccccttcccctggggtctcacccatggtattattcatgaagtaagggcaggagctaagaaactgtgaggctgaagcaaaggatctccaagaagatgtacactgaagccccattctgggctaaagggaggtgagagaccagtgtttcctcagctgcacagagatcagctgtaagaaagatcttgcaacacctgctagagggtgggagtaataagcaagtgacatagacctgacgatagtaagtctaaaggatgagcagagactcaagaaaaactgcaaggggaatgtgatgttgaaaacggatgcctccgattacataggaaaacaacaaagcacagaattcgccctatgagacttagagggaggatgctcacagcaaaggacatcaacggtgaggaaaatcacaagattctcgacattgtcacataaaacaaagtcacatttacctgctaatatattaagttggcaaacatttctgagcaagtgctaaatcagagatgctgtcatagactctgggcttactaagttattgaatttacaatctagttaagagaagcaatagaaaaaatgataaatgctataatggaggtatttatcaaatgctattggaacacagagaaataaggaattaattctgcatgagagaaatggggggaggagtcaaagggaaagtgatatttctcttatcgcctctaggttgagaaggtagcaaaaggcatttcaggaaacaggatttattaccaaagatatgaaaataatgaaatatactgcctacatggaagctatgagttctttgaacagcaatcagttcccaggtgacagtgatactgattagaaaggtatagggaggctattttttatagtcttgtatgaaatgctgagagagagttgcatgcacgtatgtaggtatgtttttccaccctcagtttatccacagagcattttaggtggcttctgagagtttgagttttaagctgtgagcaaatcaaatattataacaatgaggaatatgatcacatctgagtcagaggggtctcatggacagctgtgtagaaggtgtcctggagtgaggccagg[133 bp omitted]ggcgcctgtagttccagctacgcgggaggctgaggtaaaagaatggcgtgaacccgggaggcggagcttgcagtgagtgagccgagatcgcgccactccagcctgggcgacagcgagactccgtcacaaaaaaaaaaaaaaaaaaaaaaagaaggtgtcctggagtggaagtaaactgaaggagcagaataagattagaatgacctataatattgtagataatagattgcaataggccaggtaagagagggtaagagagattgagacagggcagggggaggggggagaccactgaccccctcccctgtcaccctccatcttcttcttcttttttttttgtttttgattttttgagacagagtctcgctctgtcacccaggctggagtgcagtggcatgacctccactcactgcagcctccaaccagcttcaagcgattctcctgcctcagcctcccaagtagctgagattacaggtgtgtgccaccacgcccggctaatttttttgtatttttagtacagatccggagtttcaccatgttggccaggctggtctcaaacttctgacttcaagtgatccatccgcctccgcctcccaaatttctgggactacaggcgtgagccacctctcccggctcctccatcttcttctgtccctttagtcccgttttctccacctccccagcacttttccacttcctttaccttcacttgctctattccttcatctccctttattcctttgtctatttctatttgttttctttcaacaacttcctttgtctcccacccttggattcagtaacatcttgtaaaattcctgtttcattcagaagctctctgagtccccttcatacaatattcatcatctatttctcaatccaatgactctccctcccttttctccctcttgtctcagcaccaccacatatgcctcactcataaggggccgcccacagtggagggcaggggaactactggatgtctcaggcatccagctgcatccagtgtcttccttgtgctgaacttgtgcacctgatagctattcacccatgcagcagtcaacaccaagagctttttaagttaactgtcattaagaatgggtactgcagggcacaaataaattgtgagatccagatataggctttggacttaatagttgaattgtggagggaaaatatagacaaggaaaatccattaacacgatgatgtattaaatgtcatgtgaaaaataattggcaaagaatcttattacagagtggaagagaggatatctttagattaagagaattcacacaggtgagtaattgccattgattattccatacactgttttaggaactttatatctatcattctacttaagtcctcagaaaattctacaaagcaggtatttttatttctaccttacaaattcccgtgaaaactgaggcccagaaagattaagtaagttactcatggtcaaatcacaatgaaatgaaagacctgaaatttgacttcagatgtatctgactccaagtgtcttcccaccactatatgaatctttgaaaggcaggttgtatatacttctggatggcgttaagatttcaggaatgtatattccagcacccacttgtaaacgatccagagacaagacagcacctagtataatggtctacacataaggatgctcatcatatgggcctaaaaccttggttctgagcccctgagccctgaaagggaaagtagtgacttcatgtatctgtgtctgtggttcattttcttcaggtgtatggagaaaacaccatggaaacagggaacctcacgtgggtatcagactttgtcttcctggggctctcgcagactcgggagctccagcgtttcctgtttctaatgttcctgtttgtctacatcaccactgttatgggaaacatccttatcatcatcacagtgacctctgattcccagctccacacacccatgtactttctgctccgaaacctggctgtcctagacctctgtttctcttcagtcactgctcccaaaatgctagtggacctcctctctgagaagaaaaccatctcttaccagggctgcatgggtcagatcttcttcttccactttttgggaggtgccatggtcttcttcctctcagtgatggcctttgaccgcctcattgccatctcccggcccctccgctatgtcaccgtcatgaacactcagctctgggtggggctggtggtagccacctgggtgggaggctttgtccactctattgtccagctggctctgatgctcccactgcccttctgtggccccaacattttggataacttctactgtgatgttccccaagtactgagacttgcctgcactgacacctcactgctggagttcctcaagatctccaacagtgggctgctggatgtcgtctggttcttcctcctcctgatgtcctacttattcatcctggtgatgctgaggtcacatccaggggaggcaagaaggaaggcagcttccacctgcaccacccacatcatcgtggtttccatgatcttcgttccaagcatttacctctatgcccggcccttcactccattccctatggacaagcttgtgtccatcggccacacagtcatgacccccatgctcaaccccatgatctataccctgaggaaccaggacatgcaggcagcagtgagaagattagggagacaccggctggtttgagagtgacaatggtaggtttcttctctttggctttgttttccctttgtgaagtggagagggagctactacctttgctctcttcatagtgtgttgaggttcatcatagcagggaatgaattttgaaactaagcaacttcgtgttttaggaaaaaagaaagtatcctctttggtggttaaggtttgtgataaagagttttaacacactcgcaacaatgagaattgttcacatggcccctgaaaaccacaccttccttttcaccttcttggtggacagtttcctgttgacagcatttcccctgtgcgaacatttctattttccgtattttgagctctcttcccaatatttccttttggtgtgagtctgggttgttgggaacagcacagaatttggagtcttaagctctaaattagaggccctgacccatcattgaccaaactgatgacttcgagtaagccacccagcttttcttggcctcatgatttctccctcaccaatttgcttaaattagtatgtgcccctaaaatattctatgtttgttatgagattcaaataaaaaaattttgtgataaaacaacaagtaaatcatataactatatgttatcttccaagcttttaaaaatgattgtattttattttcaaatatgaaattattatgagtattcaagctttttctctctatatttacattttaatataatatacaaattttgaataaaagatcatgggcaatgcatgcacattatgaaacttatgtcattatgtataaatgctcatgtatacactactcgattcaagaaccagaagttaccaataacttgccttcacctgtattgtcctctccattgtgttcaccttgattcctatccagaagaaatcactctgttgaatttcatgtttatcacttcattgcttgtataaaatagtttcatcactttttttacataaacagtatattgttttgctactttggagttttataaagatattgtactgtacataatattctgggatttgcttttttcactccatgttatgtttctaacataacatgttgatgtttggctctaattcattcatttgctctgctgtagaatattccactgtgaaaataagtttatttgggttgtttccaggttttggctattggagagtgctttttttgagacgaagtttcactctgctgccgaggccggagttcactcatcaccacacccagctaagttttgcattttcagtagagatggggtttctccatgttggagttgtgaccattattgcctaaactatttttactgcgcctttctctcctcttcttccaggattctcattatgtgtgtgtcttggtatccttgatggtgtctcacaggcttctgagcctatgttcattttcgtttattcttctttttgctccttagactggatgatttcaattgacctataatatctctagacctctgattccgaaatgccatcatagaggaaaattggattcactccccgacttccacagaaccaaaaacaaatatatagcactgagatctacaccagaaacaacccagagctcaagtataagagtgagacagttcttggggccacagagggatgaaaaaagtccaagcagctgataggagaatcagacttccacatctgggacacccctcatccccattctgtccagcaccaagtgccaaaaaatctcctcccaactacagtttctacactggaaaaactgaaattgaggtggcccaccagcttccttaccttcttggggtccctggcaggagaactgttcttgccttaatccacagatagcatcatgactgcctgaaagaagaaatgtccccgaagaaaggcagagaaattctgctctgtaactcagccaaaggagacaccaactcagagttgctgtccagcagcaccatgctgtaggaggcatgttccccaggtcccctgggcacaaacccctagccagacttcccacactgccaggataatctctttgggatctccttgatttgagacaggaagtgcttcaaccatttactagtcctgaggtgaacctgggcttaaggcaccacctagagtcgaatagaggcagtgacctagcagtgaagattcaataagcaaatgtattcaataaaaaccaaaacaagctgtacagagaaaactggaaagatggatacatacccacaagaaacaacagcaaacagggaactatgacttcctcaaaaggaaaaagcaaaaatccagtcactgatcctaacaagatggtgattagtgagctctctgaccaagaattcaaaataggagtttcaaggaaactcactgatctccaagaaaacacagaaaagcaatttagaaatttaacaaagagactgaaatgattccaaaatgtcaaacagaaatcttggaactcaactaacctatcttcagattcattgattttatttttattttttaagacagtctcactctgttgcccagactggagtgcaatggtgtgatcttggctcactgcaacctccgccttccagtttcaagcaattctcctgcctcagcctcctgagtagctggggctacaggcgcgtgtcaccacacccagctaatttttgtatatttagtagagacagggttttaccatgttggccaggctggtcttgaactcctgacctcgtgatcaacccgcctcggcctcccaaggtgctggaattacaggtgtaagccaccaggcccagctgattctttcttctacctactcgaaagctcctattgaaaccgtcctgtgaacttttcatttcagttacttttattgtacttttcagctccagactatttcttattttaaatcaatttctctctcttttttgatattttctatgtaaaacattcttcttcctttaattctttacccatagtttactctatgttcaagaaagttgctttaaagtctttgtctagttaagtcaaatgtctgttttttctcaggaagtttctgctaatttcttttcttcccttgaaagggccatactctcttgtttgtttgcatgtctcataatattttgtgaaaaccgcacattttaaatattataatgttgtaggagtggaaataattttcttcctgctccctattatttgttgttttttcttgctgtgagttgcagttgtttgtttagtgacttttaaaacttttttttttgtcaaatatggcctctgaaatctgtttccttagttcatagtcatctaatggctttacagtaactttgttaaatgcctgtagacaaatgatatggcttggacctgtgtcccatgaaatctcatgtggaattataatccccagtgttggaggtgatgcctggtgggaggtgattagatcatggggatgaatttctcacgaatagtttagcaccatccttcccttggtactgaccttgcaatagtgtgtgagttctcatgagatctggtcatttaaaagtgtgtggtgcctccctcttactctctcttcctcctgctccagccatgtgaagtgcctgctcccacttcacctcccaccattattgtaagtttcctgaggcctccccagaagccaaacagatgccagcattatgcttcctgtacagcctgcacaatcatgagccaattaaacctcttttctttataaattacgagtcttagtctcagatatttctttatagcaatatgagaatgaactaatacaacaaagaaatgaaaaagaaagaaaatatactctcccagtctttccagattggctctgtgtttggatactccctcaacacttaacaaggatgtttacagctctgccttagccttcactttctgcttgcattgggcctaaagattagccagaacttatatcttaggactgtcccaagtctgtgttttcatcctgcccttatatgcagaatgtggcattctagatttcatagtatatacaggaactttccaaagttcttattcaccaaagtatctctgttcctaacttttcctctcaagcttttggtgtgtgtttgattgccccaggtggcagaggcgtgctcatttgattttcagtgtttttgaggaatactttttacgtagccacttttctgcccatagtgaattctgagttaggtaaaacaaaggcaagctcctcacatcagtccttcaggaacccccagacatttcaaaacagacaatacaatcctagggaacaaggttcattctgctccttccggaaccagggactcacaccaggaacatacattgccatcttcaagaccaccaagctgggaggagtgtggaacaacaataagttaaaagttttcctactgtgtttcagtcaccttttgaaacaaagttcatttagttgctatttgactattttctttgacaattttccagaattccaacaaggttgattctgatcacttctgcttttattttttttttttcctttctatggagagatgagccctcggattcccagactgctatttttatgacatcatcatatttaagataataatttatgtaattcacttctctatgcaaccagtctttcctagtcactccatatctgtttccattccttcaccagatactttcctcactccgcttgggctctgatatcctgcttcaggccagcgcccttcccagccacttttcttaccccacacatgctccaacatcccacatcaggacactttccatgctcctcctcattttgcttgagctccaacacctgatgtccaactgcacctctgtgtggatgcatttcttagccctcccatgctctgactccccatagtgagtcagcccttgctgggataccctcttcaccttgctttaacacccacaatgggcagctcacaggagtagacacccaggctctgacaacccatgctgggccacatcctatggacaccttattcacactatttttgttctacattaagaggagatttctccaactctgatttccaacatttttattaaagtttttattttttaaatcaaattttagttttcaagaactcttgcatgttctcctttttatgccattctattcttattttgtggatattatattttctttcttctctcaaatgatactaatttcataagctgaagtttttttaagttctcttttgctttctgtgtcacttctgttttcttcttatttatttattattttgtactggagacctttcttaaactctcagtgatctttggttagctacatttaagagtaaggcaataaaatgctgatttgaacctctatatatgggaagagttttcaaactttacttttttttttttttttgaaacaggatcttactctgtcactcaggctgcagtacagtggtgcaatcatgacttactgcagccttgacctcctggactcaagtaatcctcccaccttagcctctcgaatagctggggctacaggtgcacaccaccatgcccagctaattattttaactttgttaagaagtttctaagactctcaaaaacacttaccattagagaggtctgccaaggacattgaaaatcacagagatctatgaaatgtaggataagcaggtcaagatcagaaaggacaaaagtatcctcacaagaaacaaattttggaaggacctgttgcagtgcacactggttcacgtgtgtgagcgtacatcagaatcaaccgagagggcttgctaaaacttggaaacccaatgcagagcttctgatttaataggtcttgggtagagcccgagaatatgcatttccagcacgttgttgggtgatgctgatattgcttatctgggggccacagtttgagactgctgatttcaagtttcgttgtgctgtgttcttcagcacaacggacagctctctcacacagcaccagagacaacttgtttgatttctttaaaaaaaaaatttttcaacttgggcaatgtaataggtggggaaatgtttgtatattatattggaaacttaaatcctctaaactttttttttattctaccaaccagaccccaagggcgatttctaatccataaccatttttacagcaccatctgtaaaattctgtgcagccaataggggtttctttttctgtgaatttaaagacaacaattattaagaatggatttttatgatcaccatgcttgagcaatgttagagataaaatactcctccttgccttgtggatttgctcccaccgccctgccgttcacgagctgtgtgtgtgtgctgcagaggggatctgagtaagcaaggaaagaatcagaattggatgggtgaagcccagaggcctcctgagagagggaagcatgaggagtggggagaggggctccatgccctctgactgaacaggtgtcaatcaagcagcgagactgcgagtgaccactgaggtgaaggctgagggggaggaggagtttgagctggagcccagactctgatgacagggagtatacagggggagcccctggacagccctccaggaactcggaagtggggcccatgggctgttaggcctggccccacagctgacagaaaagccatgaagacctggagcctggctgctttgcagtgagagctcagagggaaggagatatcgctttctcttttcctcctccccacaccaacaccaggcaagaggtgctggaaagaaggaggaagaagtgttagagagcagagtcctgcaccaccaaccacgctccaccctcggaggcctgggccacagcctcccaagttgagggacaaggtggacttggagtcgaatgtaagaagggcattttcactaaataggacagtcttaaaaactggaatgaaactggtgactattgaaataaaagtgatgaaaagtgtataggactggactgagctgctgtgaagggagagagtcacccagcaggaaagaggggtgacaaggcaccgttgggagcagtcttgagaaaacaagaattttttgtttgttcctcagtgagtagcaacaccttgttacatggattacaacgtgtttcttaaacctgagtaatatggggaaagataaagaaataaaaaacatattgaggacttctactgctgacttaaaatctttttgtgatggtatgtatgttcaaacacaaagctatgtaaaagtttctcattcttctctcttctgggaccacgaaagcaaataaatgtacacaaaaaacacaattcaggccaggcgcggtggctcacgcctgtaatctcagcactttgggaggctgaggtgggtggatcacctgaggtcgggagttcgagaccagcttgatcaatatggagaaacctcatctctaataaaaatacaaaaattagctgggcttggtggcgcatgcctgtaatcccagctactcgggaggctgaggcaggagaatcgcttgaacccgggaggtggaggttgcagtgagctgagatggcaccattgcacttcagcctgggcaacaaaagcgaaactctgtctcaaaaaaaaaaaaaattcactagcaacagatttatacgactgatctgggaatgtttttgaatgtgacattttcattctgccacgtgtcttgtgttttgactcagtttccccaccacttcgttttgcatttgatccttccttcaaacagtgctgaaggcagcaaagcattatgtgtagcattttttaaagaggcaggactaggccgggtgcagtggctcatgcctgtaatcccaacactttgggaggccaaggtgggtggaccacttgaggccaggaattcaagaccaccctgggcaacatggtgaaaccccgtctctattacaaatacaaaaattagccgggcgtggtgacaggcacctgtaatcccagctacttgggaggctgaggccagagaatcgcttgaacctgggggtggaggctgcagtgagccgagatcgtgccactgcactccagcctgggtgacagagcaagactctatctcaaaataaataaataggcaggattatttgaggccagctgtattgtaaacccaattacaaacctggacactgaaattgtgtgactgtacttgtttaaaacacacacacacacacacacacacacacacacacacacagaattgtttatttggatttttctatgcttagttgaacacgttaaagggactgtgaggtcaagcactatctacagaccaatgttattcttattaagggcctctccttccagatcatagtccttcatcctaggctcctctgaagtggtatgattggttgtgttaatggtactttggcctccagattgtctctgaaagggtgtgggtgattttatgcaacaagttaaacactgtttcataactcccagcattcttttatcccatcctcagtcccaagatctgaatttattccagtattacccccaccccccaggatattttttcccttctcaaggccaaccctatgtgacttcatctggagaagaactagagagctctgaggctgcaggagggatgggtcatcctggaaggtggccaccaaagttccctctcctgttctgaatgcaggcttcaggatgcccacctcagggacaggtctgtcctgctgaggccctgccaacacccagccaggttgtcctcccctgctctgccagagtgatggttaatattgagtgtcgacttgattggattgaaggatacaaagtactgttcctgggtgtgtctgtgagggtgttgccaaaggagattaacatttgagtcagtggactgggaaatgcagacccacactcaatctgagtgggcaccatctaatcagctgccagcactgctaggataaaagcaggtggaagaactacactggctaatcttctggcctccatctttctcctgtgctggatgcttcctgacctccaacaccagactccaagttcttcaacttttggactcttgggcctacaccattggtttgccaggggttcttgggccttcagccacagactgaaagctgcactggtggcttccctacttttgaggttttgggactcagactggcttacttgctccttagcttgcagatggcctgttgtgggacttcaccttgtgatcatgtgagtcaatactccttaataaactccccttcatatatacatctatcctattagtcctgtccctctagagaaccctgactgatacacagagtgaagcagttcctgtatcttgtttctctaagaggggctggtgaccctttagaattcagctcatttggctgccttgtgacctcatctctctaataggtttataaaatgtttatgttgtgtagattaccctgtgtttacttattcttctgttaggagctgtgcatgttccttgtgactttcttcctccgaagcagaaggagaattctttttttgagtttgattctgtcaccaaacatggtggcagggctatggatggcacacttagtgcctttatgggaattagaaaaaggcacccctttcaccaggctgatttaacccaacacctggacacagcgtggagagcatagtgtaggctggctttcagcccccacacctgctctcagtcaagttcgttggggtggggcttaatttgcagaaacaatatgttcaaaccagcacagaaaaagatcaacatggctggaatgtagaaaggtagttttttatttcatacctttcagacatctgtaagcttgacaaacgttcccctgccttctctgtctgccttcgtataagcttagtccaaagtcctggtttcccctgaaggaaaagatttttcattcattcattcattcatcctttcattcaacaaagcttatggaggtcctactgtgtgcagatcccttcattgtgtccccgtgggaaagaagaaggcatagtagaaacaacacaagtttctagaacaaggcagccaaggttgaaactccagttctgcttcttactagccctcggttagttaaatctttcctcaagtctcatttgtgaaatgagaatgatgaccctttgtcatggagtcttcataaagccaatggggctgatgtaaataacatgttttatacagtttctggcatacagcagtggcctactatgtgtagctgtacctgtgtacatacttgcaggcccggggtgctaaagagaagtgcccttctggtttggattggcaagtcaccagccagagaagggagagcccccttccctccctgcaccctgtggcaggcgtggaggggtgccactccaatgtccccacaaggaaggcagttagctgacaggatcagctgatagggtgacacgagggaccacccagcttttgagctaaggccacacacttcccaggcagccccagttgatgactgagtgtggcagtgggtgaagggctccccatttctggctgtctttttgccagggctcctcaccagtctggctggagctttctcagagccccagcatggtctgtgactcctcctgccccctcctcactccttttccctcctgttcaccggagctgggcttgtgctgcagtctgaaggcatcccctgcctatgcctgccctctctgctctttctctcatggacattgccctcttctaactctgtcttagcgtctagatggacacaactctgctttctcccacagccacatttcctatgtcaggatcttgcttcccatttgtatagtgagttccatggccagcatctcctgggacggcctcagttgtaacagctcctgctgccttgatgccacacaccaccgtgttaattctacccacaatatttgcatgatttctaggtgccaagcacagctctaaataccgaggatacagcattgaactgagcagacaagggctcagccttcgtaaagtatatggtctatgggggagactgacaaagtaacaaatggataaataatttcatctaacaagaactgtggagcagatgcatggagtcatgtgactggtagggtgggcagcatcatgaaaggtggtcagggaaggaatctctgaggagggggtgtttgagcaaagacctgggcaatgagaagaagcctgtcaggaaaagatctgaatgaagaacaagcattccggacagaggaaacagcaagtgcaatggtcctgaggtgggaatgagcttggtgttaaaggaaaaagaaaggaggctgctgtaactggtgtgtaatgaacaaagaggatcttgggaggaggtgaggtctaatattgcattatttatctgccactgcagaaaaaaatcaacccaaaacctaggagctcaaaataaagtaatcatttgctatcgttcatagatgccatggaccaggaattccaatggcacagcagacagcttatttctggttcaggatgtctttcctgggcctcagccagaagattcaaaggccagggataaaatcatttgcagtttcacgtggtcattcaatctggctgttgatgttgatgtcggctgggtgcctagatgtgcctgtcaactggtctctccttgtggcttgggattcctcactgcatggtagctgtgttccaagcacaagtatcctgaggtaggagccaggtggcaactgtatcctttccaccgcccagccacagaagtcacatagcctcacttgtactacattctattagaaagaagtgtgttgccaactccagcccacattcaagggaggggagtcacacctcacactttaagtgagacatgtcaaagaatttgtggaaatatttttaaattaccatcaatgaagacaggagccaggtcatttttaaaatcttgaattttgttctatgtgcaatggaaagtcattgaagggtttggggtggcaagtgttggcataatctaatttatgccctacaaaggtcatgttggctgctaggcagagaatgggttatagaggtcaagcctaatgaagcagggtaagaatctgacttggagaaggagacctgattcaagttcaaatttctgcactagctagctatgttacactgggaaagtcttctaacacgggagggtgtaggggtactctcttgcatttattattttatttatttatttatttatttatttatttaaatttatttttgagatggagtctcagtctgtcgcccaggctggagtgcagtggcacgatctcggctcactgcaagctccgcctccctggttcacgccattctcctgcctcagcccccaggtagctgggactacaggcgcccgccacc[136 bp omitted]cacccgggttgcatttatatgaggatttacctaagacctgcaggaaagtgtttgtttcatgtcctcctccatcaggtgcctgtttttgctcaccaccatgtacctagtacccagcatgggctgtggcatagggaggctttccataaatatttgttgaaagagtaaacaaacatataatattgtaaaccctgtgttagtccttcaggtcaaacttctctgatcttccaggtctggagtgtacccaccaacccaacaagctttgaggaattgggtagcatccgggaggaacattggggaggctctgggctccatctcttctgaaataattccatgccccatcttaaattcaagtccatgaggtctgatttcattcagaaccatcaccactgcccagatagacacaaagaaaagtaaggccggctcttgcccagagcccagcatgggtggcagacccaggagagtctgctctggggactataggcaatatcaagtggcacattcatggctggctaacgtactctccagggacagtgagaaggggcgagaagagcctctccttttcccatgacacctaccagaagatgacaccataggagggggagtggagagagagagcagccctcccatagcacgaagagccccagctagtggaattcctgcccttgacattgggcactgactgcagccatctccagggctgccgaggggttgggactgccaagatcaccacccgcatgctcaccaccactgtcagagagacactgaggaagctgtggctggggacttgggggtggggcactgcataattttttaaattgctgatttgcatttttgagccttctgagtgcccaggcaagagactgtttcattcaacagggtgtctagattcctataaccttcaggccttcattctttctaggtgtattgagatgctaagaggcaaaaatgcagcagcatgggcctgttctcgtggagagactgtgttgggtttgtatttaaaatgtgtcaggccgggcccggtggctcacgcctataatcccagcactttgggaggctgaagagggcagatcacttgaggccagagttcgagaccagcctggccaacatggtgaaactctatctccactaaaaatatacaaattagccagacgtggtggtgcacacctgtaatcccagctactcgggaggctgaggcaggagaatggcttgaacctaggaggcagaggttgcagtgaactgagatcttgccactgtactccagcctgggtgacagagtgagactccttctccaaaaaaaaaacaaaaattgaaaaaaaaatgtgcgggtcaagggaggttgggggagggtgcagccctctctcccaggcgtctgccagcccctaccttttttgtgttccttcccctttcctgcttcccctgcttctgagtagcttctatcctcctcaggacagaagcaattagtccacgtggctcacccaggagggggccccaggaaacacctcttggccagctgcagagtcagtacaattggtgcagccagtgcggcctgtcagactctgtgggggaaaccaggcccgccttggcctgctcaggcctgaggcatcctcccaacctgtgggaggtggcttccttccattgggtcacatctgggaacttggtttagaattagtctcaggttgcgatccccttcctggctccaagatcatgactcattcttttttctctctgcttcaaccatcgaacaagtcccagtcagcagctcccgcctcagagggttgttataaggactcaggcaagagcagtaaagcacagggcgctgggctggcatacagcaagaggcgaggggcaaggaattgccccggtcagctgtgccccctcctgctagagtccagcactaccagggctccagtcacactggcagtgccccatgggtcacatgccccactagccttcctactcgttacttcattgatctaaagcaaggtctgtctcttctgcaagcccacagaccctctcccatgccccaggccctgcccttgggagctcctagtctgatggaggaggtgaggtacaaactgtcacatcaggccaaggcaggagggaggagagaggggacaggtgcttgccctcagctggccctctagtgtggacctgtgcacctcccaagtgctcaccagagagccctcctgcccccgcgatcttcttcttgccctttagtgactttactagcagatcagagaggccaagcccttgctcaacgtcacacggtcagaagtggtgccagacccccaggccagctctccaagtccccgaactgagttttcttcagccttgctaaaggcagaggactgagagcttccttggtcaggagagtcctcatctctggaccacacatgtacacatgtgtacatatacacatgcacacatgtgcacaaactcctggcctgcctcagcctctggtacagtgtggggccactgcagtttgagccagaaccctcctccctgcacaccctcagtgttctcatgaaaatagggccaaggacctcattctcaggaagccctgggagcagaagcaggcccttcaggccccgcactttggccagtccctgctgtctcagttggggccgttggagctgagcagataaagagatctaatcaggcctgtggccagcagctccaccatggacggttcttgtgaaagcagaagcttgaagttttgagctggccaggggagggtaggcaggtgtggaggatattgggtattgcagctgaaagatgcccaggaaggaaagctccctcatggtctaggggctggatactgaccaggcagggccaggcctgccacagcatccactgacccagggctggcctggccccgaaagaacaatgcccctgacaaaaggcactgaatcctgacggatgtacaggcacaatccattccctgactcaagagccagccatgaaaatcaaggtgagagcaaatgcattcattccacaaatacatattcagcctctgccaggtattgtgttaggtaatgaggttacagtgagcatcaaaacaggcacacacctgttttctgtgacactcacagacctgcagggactggagcttagtcaaatccaaccctagagatatgtgtttaatgatgttactctctaggaagggagctacaaaagtaaggaatgggaaggaccagactgtggaggtgggacagaaaagctctctgtggataagacccagaggatgaataagagttggccaggcaaacagacggaagaggcttcatggttatgacccaaaacaggaaggaaataggcctgttttggggactgtaagccagtgggttcagagggcagaggaatagagggtgaggggatgggacactggagaggaaactggcaggtgccagactgtgcaaatccctgcgggttccctttccttaggagcaactgcagcagaggcgactggatgtttacaggaccagtggtgccagatctcccaaggcctcatactcccatagccaccagggagggagggacagcagcaaccagagggccggctggtcagggccctcttccccaaaaacacctctaccttctctgtccccttcattcccagtctccaagcagccttgttttctcctgtcgccccaagagcagtctttctggtgggtctcattacaaacatttcctcctgtgtagcttggtcttggacatttcttttgcccatttccctttctggagaagagctctcccacacaactcccaagcctctgaagtccaaccaggtcccaggcctgtagggagcctggcccaggcccagcagcgggttctggactccacttattgagggaagagctcacacaggccttgaagggagccgggcttcccacatgcccagccctgggaggtgtcccaagtgatgtccccagcaggtggcctccatgtccagtgggttgtccatcctcacctcccttggacagcacccgctctaaccacccacctggccagccttgcaatggagatggcctcaggacccacttggtgcccaccctaaggctcttcgttctctacatcacctcgtggtggcacccccacccctgccccaccccacccacctggcttatcaaggtcaaaaccctgggagtggctgaactgccatctggagaaggaaggagatttgggatgtggggagggaaggggacctgtcttcctttccagggtgaaaaagggtgtgtggactcacagagttagtctgtgacgtggttcactcatgttccacaaacatttctgagcgctggccctgggcccaaccctgtggtgggtacaaggtatgcagctgtaaatgagaccaggactggggatcagtggccagtccaggagacggacacggtgacagcatgccttcagtacagcacagtatgtgttgagggaagtatcagcatcaggtgccccacagacaaaaatggggtgtctaattcagatcatatctggggagtgaaaaggaaagggatgagagaaggctacctggagaaagtaatgacgcggctcagttgggaagatgagtagaagttaatcaggcaaagggaacacgtgcaaggacccaggggagaggggaacacggtgcatcagaaaccttcgggggatgaagctggagtgtggaggaagggtggtggaagaggtgagggcagaggctggagaagtcctccagggcctaggaagccatggaaggatttggagttccctgtactgctgctgaaggaatatcatgaatagaccccacagactgtgaccctgcccactaggaccctggacgggctgggctcatcccaggacacccatgagcaattccttctctacctccagtgctctcctcttccctctccctgggaaaccagagtgtgttgaaggcggggtggggcaagggtatggaaggacacgaaagcctcccaacttgtcacttagcaaaggtaattagacgggacaaatgccagtaccaaggacagggcagaggaagccacccgttccagggcagaaaataaggggttcgtcatctataggaagtttacaagaaataacaacacagataaaaggtcaggctgcttacgatgatcaccatgcaggggcaagtttacataatttcagagctcaaatcctgctccccaaagaaatcttgtgttggtctagattctaaaccattgctgtgattaccattgggcttagtaatatgtggaagcttcaagttaatgcacttttattgcttatcctttaagaagcactgtcttccatgtggaagttggttgggagaattcccagtcatacagtggctcgcttggctgagtatgttccctctgaggatgggctgatggctcagattcctctgagcggtctttggtgcaacgtgcgcctcctgcccctgttagcactgtagattcttgcatttaaacagctcgttcgatataaacaatgatagcacagtgattgtaaagatgaggagacagaacttgatttttaagtgcaaattttacttcatacatgaaatattgtactgaatttgaataattactttaagatctaatttattcttctaagtttgtaattgttcattttaaaactaatgaatggatcaagaagacagaaaatgtaatgacatattaaatattaaaactacaaatatgtatgtagatttcccctttatttaaaatgcattcatgtaatttaaaagtattaattcattatacttttcttttgtatattatttatttgtttattttgttatgtctctactggcatgattatacataaaattcactaaaagagaacttttacatatttctttgttggccattattatgacttgcttcatttaacgagtattactaaaaattattttgttgtgtagaggagggggtatcaaaaaataatctgttcccaggccaggtgcagtggttcacacctgttaccccagcactttgggaggccgaggcaggcagattgcctgaggtcaggagtttgagaccagcctggccaacatggcgaaaacccatctctactaaaaatacaaaaattagctgggcatggtggggggtgcctgtagtcctagctacttgggaggctgaggcaggagaaccacttcaacccaggaggcagagattgcagtgagccaagattgcgccactgcactcagcctgtgtgacacagcaagactctctctctctctctatatatatatatgtgtgtgtgtgtgtgtgtgtacgtgtgtgtgtgtgtgtgtgtgtgtgtgtgtgtatatttccagtgtcagatactccaggttgctactgcacaacacttaatgctaaggaaaatcttgccaatgaaatcccagtgggcacgatgaaaagcccacgagggggacacagagggcagggggcccttgcctacactcctcttcttgtccctgcatgtggttggccctgaccagagggaggaaaaagcagatgtcgacgtggaccactgtgagacatggcgagcaccctgcatgtcacctgccccatagtgggggccagagctggagagggtgggtggggtccaggctggaaagcccctggagaggggctagagaggtctctgtcacttcatcacgttcactccgtctccagtggccccgtatctggcacgcccactctgacatgaggaggagtgcttggagagcctcggtctgaacagccctaaacttggaggcctcccttccaggcgcccagccctgaagggtctgcaaatcccttgcactcactgcctccacccttcaggccaatggcaattgctgcctttgacagacagcctcaagggacctcaataaaggaagcaacaatagggcagaaaaacaaggtatgttcaacaacactgttgagcgcctgctatgtgtcaggaatgatgtctgcgaggtagactaggaatgacctccatctgacagtgaggaggtgggctcagaggttgaggagcctgcccaagtggatgacggtgctagaatggggaccaagttcagcttgtagccacctccctgtactgctctcaaggagctcccgcctgctaagtgctgtggctatggcaccaagcccagcttgtggggtgactcagaaatggcttcccagagggacctgctaggaagaggaagcttccggcagaattaggagctgcttggaaggagagaaaaggtgggggttatatgtggaaggttaggatgattggagcctaggggcagggtcctgtgggggaaacgtggcagaaagtaggctaaggagacatccagagccagagtccaggagagccaggcagcaggctctcatcaccaccccgagcaaccaataggtccaaatccccaagagatcagccaccatggcagggctgggcttagagcctaggtttctgtctcaggcttgtcccaataacccacggcagcccatggctgtggagaaacccttgcactgctcactattgttgaagaactagagtaccctctgcagggagagcagagctcactctgagtgctggggaccctggaagtacagcaatccaggatacatgcaccccatcctggctccaacctgggttacatacaccccaccccaactccaacctggagtatatgcatcccatcccagctccaacctgcggtacatacatcccactccaattctatcctgggttacatacaccataccccagctccaacctggagtacatacatcccaccccaactccaaccaggggtacatacgccccaccccgactcctacctggggtatatacaccccactccaactccaacctggggtacatacatcccaccccaattctatcctgggttacatacaccccaccccaactccaacctggggtacatgcaccccaccctgcctccaacctagggtacatacagcccaccccaactccaacctgggttacatacaccctactctggctccaagctatggtacatacaccccaccctggctccaacctagggtacatacaccctactccaactccaacctgggttatatacaccccaccctggctccaagctgtggtacatacaccccatccagctccaacctggggtacatgcattccacctggctccacccggggagcacctggctccctgagggccgggaggtgacacacagctgaggagtgctgtgtgatttatataatctctctcctccatgaggctccctgtccccatctcacaggtttggaaacaggtccatggaggggtgtgatttacccagtcactcagtgggtcagcatcaaggaacccagtgtgctttcagctcctacacagtgacttctacccaggccccccgtcacaggagaggggcctccgctaaagataaggagataagattaggagggctcaggccatcaactggagcttgtgaaaggggttgccgaagagaggtggttgtttcaagagcaacggttgggctggtaacattgctgtgggaggaggaggctgtggaaggcaccgggcagggtttcggtagggtgtgggggtgggggaggagaaaggacacttggaacagcctccctgggagtctggagcaggcacggggtccacactgaagaaggaatggacgtgtcctcctgaagaaggggcgaggacacgcaggctgctggccacagtggtggtgactctggaactgtctcagggatgagcatgtgctctccaggcagccgggatgaggtcagaggcaaaggatgaacctggctcatccagggcagggaactacaggaggaaggcttaggtgcagagagggtgggccctggcagaaggccgactgggatgcactctgcacttaaggtggaaatggaggcgcacttaaggtggaaatggaggctcacccaaggtcacgaagctagtgacagggctggattcaatccaggccaatcagaccctggtgcagcacactgcctctaaagaagctacttctcaccaagcccaataggaactcataattgaaatctacttctcagagtaaacctactactgattggcacctaagaaactccaagagaataaagcccatggcgggcgcttacttttaggctctgcagcagctcactgggctgggtgttttacctgtgacatctcgccatgtccccaaaatggccccatgagggatttcactgccaggccctgcctcagtcacagcctcacactctccctggcaccttggagggagtgagtagggctaggggataaggagaggggccaaatcattcatcacagatcattcattcactcaacaaacacctgctaagcacatactaaatgctgggctttgagctgggtatggggggtgtgtataacagtaaggcagattcagtttctgccctgttgcaggaggagaggcacccttccaatcatctggcccaactctcattctagggatgtgaaaactgaggcctggagagggaaagtggcttgcccaaggccatgcagccaggcggtggcgactgaggtgcaccgctcctgtcagccaacaaatatccattgagcgacacctgtgtcccaggtgctgctctgggccctgggagaagtgcatcagtgggcttggtagtagagggtagggatggagtgaagggtaggcaggaagaatgtccccaggctggtaggaggtggggtggggggtttcagtctcaaaactcccatgaaaaccagagagaagtttcagaactccacccaagaggctgggtttctagggcccagagctgccctcccccaccctagaatgggctataaaagtcccttcccagctacgtccagagaagagctggaggaagtgagaggtcggctgggggtcctcaaagtgagaggggagcagaggatcctcccgtgcaggctgtggatgtcactcacttcccagctggtgaagcctcgctgcagagatgcatctgctcccagccctggcaggggtcctggccacactcgtcctcgcccagccctgtgagggcactgacccaggtaatagtcccctagacaggcaaggaggagggaggggaaatggaaggggaagcacttgggtcttggagggggtcttgtggcttgctgaaccctgagtccccatctctttgaacagcctcccctggggcagtggagacctcggtcctgcgagactgcatagcagaggccaagttgctggtggatgctgcctacaattggacccagaagaggtggacttgggtctgggggctgcatgggcctgggaggatcagtgaggggcatgggccccagccaagttcatctcactcatcagccacctctggaccccatgaacatttcctgttggtagagcctcccttccatccatccttctgtccgcttgccctgtcctgactgtgccccaggactgggtctctgctgggtgggtctgcaccctctctccagccctcactcctcctctcctgggcagcatcaagcagcggcttcgcagcggttcagccagccccatggacctcctgtcctacttcaaacaaccggtagcagccaccaggacagttgttcgggccgcagattatatgcatgtggctttggggctgcttgaagagaagttacaaccccagcggtccggacccttcaatgtcactggtactctgatccccactgagcccgctgggcctaccctggcctggagtagaaggaatccaggagagggaggcagggtgcacaggtttggggtgctgggaggagagagggtaaagggatgggaggtacagagcaggccagctcaggtctgcccatttgccttcccacagatgtgctaacagaaccacagctgcggctgctgtcccaggccagtggctgtgctctccgggaccaggccgagcgctgcagcgacaagtaccgcaccatcactggacggtgcaacaacaagtgcgtgcggggcggcaggaggggctgcccctgcctgggggacctctcccttcctgcacccaccctctccctccatgctgagccatctccaggccctgccccctgctaacctatcccacccatggctgcaggaggagacccttgctaggggcctccaaccaggctctggctcgctggctgcccgccgagtatgaggatgggctgtcgctccccttcggctggacccccagcaggaggcgcaatggcttccttctccctcttgtgagttggggctgagggtttgggaggttgcttgatctcttaaatgcggggagtaaaacacagcccagagtcacgcaggcagggcttgaacccaggcccttccactgaccagtgcagtgacttgaggcaaataacacagctttctgaggcttagtttcctcatctgtaaaatggccctaaaacctacctcgtagagcctgtgtggatattgaagtccttggtataaatagctatagaggacatgatctattcatgctaaccattacggtgttgtacggttttttctgagaaaattagtgtcaaagtcttgctaaatataaacagctctataccttaatctggctttatctattgatctatttcacatttatcaactcatcagttttctattgatatatcgatagagcagtctatcatctacccatctatcaacatctattaattaattttcttctatccacccttccatctgctgaccccgtactccctacgtgtattatccatcacctggcaaccagcccatgcacctgtgaatccgtgctatcatctggttagctatcagtgtacaaattgatctatctatttgatctcccttcccctctgggagagctggtgaggtctgagccagtcaacctagcccctctccttctctttaccaccggaatcctcaggagcccagccagaaaccatccttctaggaatgagagcaggaggtggctacgcctccagggacaaaaggggcatggagggcagaagaggagaggctgtcaattccagcaggggagctgctgctccctgagtcctgggttggctctaataccttgtggggtcagggagcccatgtcccgtgctgatgttatttccccaccaggtccgggctgtctccaaccagattgtgcgcttccccaatgagagactgacctccgaccgtggccgagccctcatgttcatgcagtggggccagttcattgaccatgacctggacttctccccggagtccccggccagagtggccttcactgcaggcgttgactgtgagaggacctgcgcccagctgcccccctgctttcccatcaaggtacctaccctcagccaatctcccatgcccttgtgtggcctcccccaaaggcaaggtgctgggggtggggatctggaagactggagcaccatccttaaggagctgcctgtggagctagggtatgagacagagacacaagaaacacagctgagcagagaccccgcgccgtgtgtgtttgagaggtgggggtagggcaatctgccaggaggctcaggtcaggcttcatggagtgggaagcccttgacacatgccttgacccatgggtctgaatccaacaggggaagcctctgggcccctgcttttggcaacctaagggcctcttagctcttgcccttctctccttcccagagtagtccaagggtcctgcggctcttgccagcttcttgggcttgggctgtaagtagggtcctaaccttcaggctagaagccaaggacagtgtggggcactaggggaggaaagatagaatccagggagcagagtctctgctaggaacatagggttgacacacgtgcacacacacactctctcacacacacacacgtgcacacacacgctccctctcacacacacatgtacacacacagtcacccttaataggtggggccacattcatgagggatgacatgtgagggcctctggatggcctctccctgttgcaaccttatctattcctcaatccctggcttaggggcacctcctctggggagccttctcagatcttcctattacacttttaacatatgtcctcccctcccctctcctctctctccttccttccttcttccttcctctttctttctttcttctttctttcctttccttccttccttcccttccttccttcatttccttccttcctttctttctttctttttctttctttttctttcttccgtcctttctttctttatctttccttctttctttcttctttattattattattattgttttgagacagaatctcactctgttgtccagactggagtacagaggggcaatctcagctcactgcaacctctgcctcctgggttcaagcagttctcatgcctcagcctcccgagtagctgggattacaggcatgtgccaacaagcctggctaatttttgtatttttagtagagattgggtttcaccatgttgacaaggctgatctcaaacttctggcctcatgtaatccacctgcctcggcctcccaaagtgctaggattataggcgtgagccaccacacctggcccacatatggcttttctatcaagcacagcagatgccacttcaacttagtttcttaactctatgtgtgtgtgtctttttccactgaactgccagcttcctgcaacctttcctgtgtttttttaaccttcataatctccaaagcagcaagcaagaaaggggcttagaaaaggtctgtcgaattgaacagaattaaagaagctcaggcctaagagtcaagagaactaagttctaatcccacctttcctgctaactggttgtcacttcccctctctgaggctgttttccttgctgtaaaatgaggatcgagattgtttcaaaagcctcattcattcctaaccttttgagactctatgaaacaaaatgttaaggacactcagactgacggggtgagcagcatgagcctgggtgagtcaaggagggcttcctggaggaagggagttttaagcaaggttttgaggaggtggaagatgacggagaggagtgagtctgctattgagggggccccatgtcactgtctcctcttccatctcagatcccacccaatgacccccgcatcaagaaccagcgtgactgcatccctttcttccgctcggcaccctcatgcccccaaaacaagaacagagtccgcaaccagatcaacgcgctcacctcctttgtggacgccagcatggtgtatggcagtgaggtctccctctcgctgcggctccgcaaccggaccaactacctggggctgctggccatcaaccagcgctttcaagacaacggccgggccctgctgcccttcgacaacctgcacgatgacccctgtctcctcaccaaccgctcggcgcgcatcccctgcttcctggcaggtcagacagggaggaaggtggtgtcttcccaggaaacagccatccctggggtcccaactgggaagcaatggtgggatgtggtgaaggtacatggtttgggacctcagtattaggcacaccataagcatggatctgtgcacagccatcatagaatcagaacgttgagtccctttgcaagctccctgtgtgtggccagagataactgcttaaccgtctccagtgacaaggctctcaccgcctctatggcaccccagctcagccacaggcagctccgactgttagaaagtctccttattttgatcacatattcacctattccccttaatcatgcttctggaacctcagaaaagacactgtccctcttacacgcaggaatacctcaaagtagctgttaactccatctccattttttttctcttctctgggataaatttccgtagttcctccctgtccccagctgttgctagacagttaataccctcttctggaagcataatttgaactttcctcagggtcttttgtcccatgtacatggttacaataataatggtagtcatttctcattaagatatttatcttattattattattattttaagatggagtctcactctgtcgcccaggctggagtgcagtggcgtgatctcagctcactgccacctctgcctcctgggttcaagtgattcccctgcctcagcctcccgagtagctggaattacaggtgcctgccaccacgtttggctaatttttgtatatttagtggagatagagtttcaccatgttggccaggctggtctcgaactcctgacctcaggtgattcacctgccttggcctcccaaagtgttgggattacaggtgtgagccaccacgcccaaccttatcaagatatttaaatgtgccatctctaaaccttgcaacagccctgaaaggagggaattattattgttctcattttacgataagaaactgagactcagggaaagtgaatcatgcgcccaagagcacagagttagtttcaaatgacagagtccacttgagaacacagtcagtgtagtatcaaggtctctgcccagtccactgtattccactgttttcctcacagagagtcggccccaacccctcttttgaaggattgtacatttgtgtgtcctggaaagagcagcttgtgccttcgggagaggtcaactgaactaagaccttgtgcaaaagggtttagttaaaaccaagcaaatgatggaattaactttctttccctgcctgtagtaggtctgttcgtaaggacagtctctgcccaaccctccctctcttcctctttccctctggttcacgggggagagcagtattataccaagcccaaagataggaagaggtacaccagcccttggcagagaacacgcaggcagatgcagctcatggacaggtgggctctcagtcccaaagtcaaggtgcccttgcccatagctggtccaggctatggatctggttgtcttgtagagtagaatccttaggcaaagatgcccctgcctgagaccagcagctgccctgtgctttcccacctcacccaagcctgctaggaacccccggtccttccgctcctggcctgtggtgttagggaggagggtggcgatgaggagcctcagcacagctgaagagatggaggtccagtgagggccaggagtttggcccaccccgtctctcccatccccagccctgggtctaccctggtagaaagacatttctctgggaaaggctgcagtaaatctgagcttggggttttcaaggtgacacccgatcaacggaaacccccaaactggcagccatgcacaccctctttatgcgagagcacaaccggctggccaccgagctgagacgcctgaatccccggtggaatggagacaaactgtacaatgaggctcggaagatcatgggggccatggtccaggtaaggagctctgcatcccagcatcccccagatgacaagcttggcatgagaagcagtccttaacacatccttgcggatgtgcctaaaaccagctgggtctgggcaactggcggagcacctggacctgtcctctggccccgattctgcctctaactcccgtgtgaccctgtctgtgtcactcaccctctctgggctttgtatctccacccaccaatagtaaattaatgttgtcacatttgacgtgatgacaataaagaatatgtctgagccaccctttgaaaaggcaagggtatgggtgagtagcctctggggaatgttcctcctgtcttcccttccagatcatcacctaccgagactttctgcccctggttctgggcaaggcccgggccaggagaaccctggggcactacagggggtactgctccaatgtggacccacgggtggccaatgtcttcaccctggccttccgctttggccacacaatgctccagcccttcatgttccgcttggacagtcagtaccgggcctccgcacccaactcgcatgtcccacttagctctgccttctttgccagctggcggatcgtgtatgaaggtgaccaggttttccagggggcaaatgggggtgagggtggggagcatgccctcccctaggtgggccaagcttactgccaggaagccaggctgctgcagaggccactgctaatatctccccaggacagtggaaacaaggcaggtgccagcaagaccctcagtcacgggcctcccatcctgtgtggaatgagaggattttttaaaggggtggagactaatgtcagattgatggggagctcaccttccattccttaagaagtacctcccagctccagctgcttcatgtctctccagaactctgtttcctgacaaacgttactaacatacccgactggcttgtccagctctgggctagcttggcatcatgtgataacccaagtagcttcccagaggctggtccaatctgtgctgctcacattccctgccaccagggggcatcgaccccatcctccggggcctcatggccacccctgccaagctgaaccgtcaggatgccatgttagtggatgagctccgggaccggctgtttcggcaagtgaggaggattgggctggacctggcagctctcaacatgcaacgaagccgggaccacggccttccaggtgagggggctgtccacctcttctcccagctttgctcgggccaggctgctcaaggggttctgggaagaccctggtacctcctttctgactgggactgtctacaggatgtgcaggagtgcagaggcatgcaaggccaaggtcgatgtcccaaagcactcctggaacaccgcttgctgtcctgccatggctcccccatccactgtaggggctccagctttaggttcaccacaggaccagcacttaggctcaggagctgaaaaagggaggctcgaactttccaagtagaaaaaaagcaataggcttaaaaggcagggaagaactgctccattcccaacacgctggcaagttccaaggaggaaggctaaaattccagagctacagaaacgctccttgctctaagtggagaaaggcaaagagccttagaggcagggaataggtggaataaaactaaggctgcagtggctgtttggtgagggcacaaatgactttatcccaggaaagaagaaaatataggcactttgttagtcactttcatgtatattaatttattttgttctcccaatcaccttgagaagcaaatgattacagccattttatagatgagaaactatgttcagagacagctagtaatttgcccaagatcacataaataagaagtagtaaaatctgaatttaaatttacaatttctcctttcttccccctgttcaaccccagtaggggaaggttttggccactgccttgctcctctctccttcccacctcctacctccctgtctagaaagaacctgaaggcccatctgcccatgtatgaagcagtggtggcacctcctactgcccaccccacttcacacagcgcctggtagagcacagcaggcactccggaaacctgagcttctttcctttcttaaacttgggcgctcctggcagctaaggagctgtgggcaccccctgccggagagctgagatcgctagccacccaagtttctattaggttttgaagggaaggcaagggttaaggaaagacacaaagagagagggcggctgaacagccaatgcaggtatttatttccagcataaaacctacagaggtgggggaccagcttattgccagaacctgccgccgcctacagctggggtactgggtatgggtatgggtatgggcaggaggggtctgggtcgtatggcttgctacccagcaggatattgataagatgtacctatgatcaggtccttttttcagtgggatgtggtaagatgttccttggacctttgcccagcaggatatgatagggatgttccttcagttgggcctttgcccattagggtatgttatgtttttcatggcccgacctcctgtggaacgtttcactttgaccaaggtctgggaaatggtggggggcttagaaaatggtgcagtttggactaacattcttgccttctactttggtataaaaggaagagctggagagctgagatcgctagccacccaagtttccacattgcgagcttctgctccccgcaatacctgtgccctccagaaatattatcctgacactagctcttgcaatctcctctaatcccttcccaagtccaacatcaaactgggaactggacaacctggtttgagctccacttaacagtaaagtgaccctgaagcctatggttgctcaactttagtaaacataccagatatagttagcatgccataaaagcacctcaaaaaggtgctgtgagggtcctgagatattcacccaatagtgctcagtaatggtaaaatactgtgtggttttcatgggttccgctgggggatggtgtgtgtgagctgtagttcaatggatgacgttgggctggtgtcccttcgggacatggcaaagctatctcctaccttgattgtcacatcttatgatgtggcttggccctgcgtgggatcctgatggctgacaaattggtatggcttgtctttggaagtttctgaaaactttttaaaaacttctttattgagatataccataaaattcacccatatgaaatagacaattcaatgattttagtgtatttagagttatgcacccatcaccatgatctaatatcacaccattttcactccccaaagaaaccttgtaagaacagtcaatccccatccccaccccagccccaatcacctctaatatactttgtgtctctatattgacctatgcaggacctctcatatcaacagaatcatagtgtgccgtccttttctgagtagatgaattttatcattgctctccatttgtttgcttgttcattcatttattcatttgctcactcattcattctacaaacctgatggagagtcttttatattctgggtactgtcttacttgtgtctaatgaatgcagtcgagcccagtaatatcactaagtgtcggatttgtggttatgagttttgggttaaaacagctttttaggttaggacacactcctcagtctgatgcacactgagcacagttgtccactcacattttcaatcagaggacagaaacctagtctttggaagctctagggactcttctgccagcaggatcttctggttctgcccaatattgactggccacagcttccccccagaggactggtggagaaaaacagaagctaatgggagatcagcaagactgaagctgcttctccccgttcccctgcagggtacaatgcttggaggcgcttctgtgggctctcccagccccggaatttggcacagcttagccgggtgctgaaaaaccaggacttggcaaggaagttcctgaatttgtatggaacacctgacaacattgacatctggattggggccatcgctgagcctcttttgccgggggctcgagtggggcctcttctggcttgtctgttcgagaaccagttcagaagagcccgagacggagacaggtaagtgaccctatcataaaagacatcagcaccagaggcagagcagaaaaacactagcatttcaagactaaacattgaagaacactgctctttttagtatcatttcttccaagttcacaggatctgaaatcaggaggctcctctctgaaaagctgggtcaaaggaagagagacactgacccaggcaaggcccatattgcctgagctggagtcatcttaaacccagaggttgcctggcagcctcactattctgggttggtggatcccagaaaacatgggcagaaagggcta[224 bp omitted]gaggca[137 bp omitted]gtctccttatttggagttggtattgcccgagttcaaatccagccctggccacttaaattactgtgcacttaatactgggcaatttatttggccactgaatttgtttcatttctgagattccaatcttgcaggaattttgtgagaattgaatggaataatatatgtaaagtacctggcacacaacaggtgctcattataaggtaattcctccccagccttcacccacatctctcgactgcctggtaggttctggtggcagaaacgaggtgttttcaccaaaagacagcgcaaggccctgagcagaatttccttgtctcgaattatatgtgacaataccggtatcaccacggtttcaagggacatcttcagagccaacatctaccctcggggctttgtgaactgcagccgtatccccaggttgaacctatcagcctggcgagggacatgaggcttctgcaggtaaggggaggccacctccagcaccctgggctgggttaagccctcacatccttccctggatggatggctgagtcctcttaggtctctaagcagagaaaacagaacttgtcactaggtactctttccaagtggcttcccaatgtgctagtttctgggctgacagtcaattccaggccctaggactttggggggaaattaggagcatccaactatcctcagcttggtcactaatacctgaaaacagctccatttctaaacatccagtaaattcctgacttatccagttctgttacttccacaggagtctatcccaagtctccaacttttggagacaaggggaaggggaggaccatgaggctgccttgtctccctggagcaagtgcaggctgctgacgcttctgctggctacagctcagagctgggttccccagccaggagtgaaggctgggggctcctatcagcaatggaccttcccgccttgggagcctcttaggtattaggctatgaatcagcgccacgtgcaaaggcttgggagccaagccatgtggtcttgcaccccaggcaagaaaagtcagctggagggtttacagcactttctactgtttcccagccctccctcccctccctcaccatgactaagagaccactcggtcctagcctccagacaccccacaatactcctctgagcctgaggccaggcagcatgctctgcttctaccaataaagcactgctaagggcaggggctgctgtttctgtgttgggctagggaagacgtggcctcagttccatgctttgctccagatgtttaagagaagtgctgttaacacgcaagctggcacaaccatctaagcctctcctgggggctgaattaggagagcccaaagaaacactgtggagtagggaaaggcagaaaaggggaagggcagacatggtaggggccccgacattaagaacaccctagccataccagcaacctgagcagacaaacagccaacagaacatcagtcaaaataaaaggggtttatgtaacaaaaaacaaaaaaacaaacaaacaaaaaaacacagtaaaagataccacccagctagcagaaaggactcagcactgccttcagccttcacttactcagaaataactcatatctcaacctcagcaagccccaagcagtagaatgaggcttccctggaaagaggctgagactcacaggctggggatttaagaccctctcaccgtccaccttccttccttctttggtcttggaagatgaaaggctccatttttaaagggtggagaacagcagatcccctgctactgtgagacaagccagaaaagtgagtcaaggccagactcactatggggtcaccccaaacagcttcagatcaaaaagcctgccttgctgtgatgcccattgacagtggctgcaaatataaagggggggccacagggtctctggctttatttccacagggtagggagaagaccctgcagaaggctaggcagaggggccagccgggaatttcccagcttttctggttctcagcagaccaacgtggtctctaatcagaaagacgaagaggcaggagagcactggcctcagatatcccccatcttgtcctcttgcactgtgggccagggctgctgtgagctaggagaccagggttccagaggggctcactaggtcctgcgggaggctttcccgggcctcctgcatgcggcgccgggctcgacggaaggcctctgtaaggaaaggagatatgctatttggctgccatatggtatttctctctgcactgcagagagaaacaggcccatgctgacctggggtggccagctgggggaggggacatacctagcacattgtgaatggaactctgctggctgaacccttccagacggtccaacacactccgcatccttttctgaagggagctcgattccatgaaggccctgcagggaggccagccacatggttacggctgtctccacccctcagggctaaggtgccctgaggcagagggccaagtcactcacctggactgctgcagacagtgcaagcggaaggtgacagtgcctgtggtctctgtgcggagtccaaagcggctcaggcgttccccctgtggcatgccattgggacagcctcaggtttctgctctctctagacacccccgcaccatgctggcctcacccccattcttattcccattcttgggaagcgcagttctgttggggaaaccttattccatcacccagactctattacctcaaggctaatactgggctattgggctcccccaactaaaccagggaacattccaacctcatttgagaagcggcggtcttatatgcttactgtgaatcctccccacatctgattactgaggccttcagtgatgggggaaagagccagttattctgatgggaaccaggggaaatctctaattatactattttccagagacctcctacgatagcagtgtagatattggaacctgattcaaaatgtggtcatgacttccagcttaagccacaggaaggaaggggttaatactgaagcaatgcacaactaaggggtcttgacccagatcccacctcctacagaaggacaggaccataagttctcagcgtgaagtcactccaaagacaaaagtcaccttgaaggatcctggtatccgtacataggagaggtcctccagttccagagaaccgccaatgaaaaacctcctcagctcagccaccgtgccaagctccacaggtctccacgtggagactgtcagggtgtgtgagcctgcgcaagggaagagaagactggggccaggtccagaaagggcatgtggcccctcactgactccccagcaatgacacaggcctagactcagctaaaacacctggtctggtgatgacctggcctctggtgcaggttatcatggttacccatagcacctgtatggaaatcaatcagggagaaattcaaatttccgctctgccagttattacctgcatacccaggacaggtttcttaacctctctgaagctcattctcctcatctagtaaaatggaaataataccacctgcacctcacagagtgactgggagaattaagtgagaagtatggcacaatgcctggcacacagtaaaagacagatgcttttattccaaactgaatgctgattcattcaatacacatatgctatgagccaattttgccatacagcttctcaccctgagtccaatcagaggagcatgaagcacatggagagactgtcaggaagtcagtgccaaggccacgtcattgtcgctaatggaggggggcagaaagtcctcagaggaacaggaactctttcaagccaaacatttccaattcccaattatctccacccctcaccagaagcattcgagtgttagtcttgttcttagggcctagggcatgtgggccacagaagggcagagacgagcggttacctggagtggcaggcagcaccacagccccatagccttccacacggtacctctgccagaagtccagcgagaggacctcacagtagagcacaggccactccgggagtgcatctgggagcaaggagagaagcggccaggtcacaggcggccttcaccaagagacagcactgcttgaggggaaccaaggcccaggatcaactgctgagctactcaccagaagattcatcctcatggaggaagaaggcttcaaacgtgaatgggtaggagaagtgagccaccttgtcctataaaaaggagtgtcatagggtgggcaaggcctcccttggaatctgttctccttgtggccaatgacaaggttatcttcacaagggaaaaagaaaaattatcacccaggtgggaaataggagtctgagatgcaaaaggacacccaaatacaagctgctgccatgctcaaaaagacagacaggatctccggaccaggtggccctgtagaacccacacacaagtcacccaactctggaatcctccccagggcgcacagcacttggcctgataaaacctcaaatgccatcccaggagcagatctcattcccttccagatacccgctctcattctccataccattgccagggacttggtggtgcaggtctgtgttactcctgagagctgctggaatgctgggcttgaccagtctgaaagccaaagaccaaatatagtaagctcgcctgggaggaaagcaagtcattcagaaaaagacagtttcttttttcttttcttttttttttttgtatttattgatcattcttgggtgtttctcggagagggggatgtggcagggtcataggataatagtggagagaaggtcagcagataaacacgtgaacaaaggtctctggttctcctaggcagaggtccctgcggccttccacagtgtttgtgtccctgggtacttgagattagggagtggtgatgactcttaaggagcatgctgccttcaagcacctgtttaacaaagcacatcttgcaccgcccttaatccatttaaccttgagttgacacagcacatgtttcagagagcacggggttgggggtaaggttatagattaacagcatcccaaggcagaagaatttttcttagtacagaacaaaatggagtctcctatgtctacttctttctacacagacacagtaacaatctgatctctctttcttttccccacatttcccccttttctttttgacaaaaccgccatcgtcatcatggcccattctcaatggtcgctgtctcttcggagctgttgggtacacctcccagatggggcggccgggcagaggcgctcctcacttcccagacggggcggacagtttctttattcatttattcacacaatcaatcattcatttaccatttactgagtgcctgctatgtgctagtatatcttaggggtatcttggtaactagatagaaaagatccccatctctcatggagctgacattctgggggaagcagggagacagacaaaaaccaaaccaacaagagactattgggtagtgatgagtgctatactaaaaacaaaacggggaagggactgagtgattgggaggctcatttagactgggtggtaagagaaggcctctcagaggcgacacaggctgagacctaaactcagaaagaaccagccatgctaagatatggcagaaagggtttcagacaaaggaaacggcccttaaaaggctacaaggtgggaatgaacctggctgggaagaatgactggaaggttgtatggaagagataggcaggggccagctcattcagggtatcaagtttacattttactctaagtgggaggggaagctgttggggttttcagctcaaaagggacataacttgtttacattttttaaagctcaacttggctttggtgtctgtggcaaatcaacggcaaatgggagcaaggcaggaagcagggggatacatcagaagttgaatgcactggcctagacaagagatggtggtggcttggtgtagggtgctggagagaacaaataggttcacaacagcttttgaagacagaacggacaggaactgttgacagattggctggctatagggagctagggaaagtgagggatcaaggatgttccctaggtttttggcatcaacaactcagtagatgacactgccattctgttaggatggggaagaccagggaggagaggtttgagggaagaggaggaatcaagagttctttttggtcatgttagacagaaatgacaaaagaggtaactggatatgagtctggagtccagggaaaaggttaaggctagaggcagaaacctgggagtctgagacgtattgatggtatttaagccataggatggatgacgttgcccaggaagactgcagacagagagtaacagaaggccttggcttagctgtgggtactctcacggtttaagatcaacagaagggaaggcatcacccaagaaggatgaggggccaccagcgagataggagagagaagtgtggagccagaagccagagaagtgtgtcatgcagcacagtgggctctggaaaatgcttcaggaaggtcaagcgaggtgaaagcagggaagtctccactgggtttggtaaagtggatgtgatctatgaccttgaaaagaacagtaacagtttcagcagaggagtgggaaaggaagcctgaccaaatgcctctagatctgtctgaatgggtataaaaggagagacttaagaatattacttacgagcagttggcaattctacaaagaagtggacgtagagattgtcatactcatagccttgggctgaaactacgagagaaaacaggaagctattttagctttttctcctaccacccttagcacccaacccaatcctgaggggcctacacaccctgagagcaagtcttttgagggccaggaaccctctgcgtttccaggaaagactcaccactgagtttcccaagtacagcagacaaggcctctaccagagtggaggagactattcacagctccatctaggcacgtgcctaagcatcaagagatctatgctagcaagacacttaccgacctctccatttacaaagagccggagggcacctgggacagtctaaggtgaagagaagtgggaaaggatcagcaggcctggagggaattggcacttctcctccagccccatctacaaatctgcagacgacctgccactaggggtcaggccctgggtgtcactactgcactttctccccaccctgacacttctccacagatctgtttccttcattcctaagattcacaatgtagggggaaagtacataatttaaatggcagtgaggacaatgcactatgggaaattattcaagcaacagcaactgtcctgtggtgtgcaatgggaagccagaacgccctcttccctttagatggctgaggtcaagaaaccagggagttttcttttttaattatttgtgcatgtcttatctaacttttaaatactgaatatctgttgcttatgcaatatggaaatagtgaaggttaatttttcagagaaagagagggagaccaggaagtaattctatccttgtttccaggtctagagatagaactcttagaatgagaaaagacaaagaacagcacaacagaatagctgaactaaaccactttctttttttttcagacagggtcttgatctgttgtccaggctggaatgcagtggtgtgatcatagctcaatgcaaactcaaacttctaggctcaagcaatcctgctgcctcagcatcatgagtagctgggactacaggtatgtatcaccatgccttgctaatttttttttttttttttgtagggatgtggtctcactatgttgcccaggctgctctcaaactcctggcttcaagtgatcctcccaccttggcctcacaaagtgctgggattatagtcatgcgccaccgcatcaggcctatattttttaagagccaaaatatgtgacaaacagaaatggcacccctgcctctctatggggtattttgaaaaaatatccacatgaaaggtgaagaagacatttttcatccttatatttattttttaaattaattataaagtaatacctaaatacattacaactgataaaaattcaaagctacctaagtttagggaataaaaagcaaaaatccctaatatatccctctcaccacccactacccttctaccacatctaatcccaccctccccagagaaagccacccacagcatgtgcatagcctttcagacctttttcttagcattaacagttctctatcaacatgcaatgttgcaaaacacataacaaggactatatgtgctattctttgacttccttttcacactgtagagtatacctttgggcctttaagagaggtagtgtaactcatccacagtcagaatgctccggctaaacacagctcacagtgctgcaggaagccaagctactcaccatctcaaagtcggtgcctacgaggctgctgagatactccttgtgccggccataaagctgaggaaacaaaccaaaccaaaactcaagatgcaacccaagctagaccaaagttcagttctgaatgggaagaagaaaagcaatagtgggaagggtcagcaagagctggaggcgtaagcacctgactcaccgccattttaccgtgaagcagaggccctggagtcagctggtctggggcagaatcctgactctcgcccttacaagctatgccaccttgggcagactacttagctcctcaatctcggtttccccacttataaggtggtaataagtgttcacctcaaagggttgttgtaaagactaaaggaaataaggtatgtaaagtacctagcacagaacatggtaaatgctcaaataaatggttattgttattattataatatgatcaaaaacttctgtctgatatgtcagcaatgctgcctaagtcagaaggggccatgaagggcaaggcttttcccgagcaactgctgacatcaagttcagaaatggtctcagctccaggcactgaggctcatcccttggatacttggaatgaacttgcgcttacatccttgaacactcgccgttcccgctcctcctcctccggctgtgcgtggggggaaacattgtcgatcgtatatttccacagctcctgcttctccccctccgtctcaatcctgtaaggtcaaaaccacagaaaggagcaactctaataatgagagatgggccctgggatagctcccagcccagggatgagcgatcaggggccatacacctcactaaagtatatgatgataaaagtggctgtattgacgaccaggagagagaaacaaaagggtaaagcagagagggcaccagactagactcagaaagtataggttctgggcccatttctggcttgaagttacagtcaaactgtaaggcacaacattcctgccacccagttctctcacctgaaaaatggacaggttgggccagataatttctaatttacatttctgtcatttccaagatacagagatgaggaacagtcagcccacaggaaaagcctggctgagttcaccccactctgttctggtcaggtcctacattcagcagcacagagaatcactgtcatttaactgtaccactgaagtgatccctttcaaattggtgcagttgcacattttctgagaaaggagtccctggttttctaaggccctatgacttggaacagaatacgaaccattgcctgggaatgtaaaagttagaacagatgaaggactttctgacagtctagttgactagggacaaaaagtgcaaccaagggaaggaatgccagtctccactacccctttcttcctctcctcacctgtagggtcctttgaggcccgtgaagtcaggctttactgtgatcacaccattgctatccaccttcagagtacacaggacatgttcatacttcttatagccaagcctagaaatcaggaaaacaccaaggttgaggtcaatggtccttcagggaaacaagaagagatactgagcccactgcaggggagagaacagaggctatagggagagctgtcatggtaaaactttcttccaagtacaactaagaaaaaaaaggaagaaaaagtcccttcctctcctataacccaggatgataacaggaaggggatagctggtgagaggagaagaagatgaggatctgagttggcagtgagaagcttcactcataactaagaagagaaggaagaaaaagtccctccctcccctataacctaggatgataataacaggaaggggagagctggtgagaggagaaaaggatgaggctctaagctggcagtgagaagcgccactcactttttatagggccccaggtctgccatgatgtgcattgtctgaagaggggtgttaatgacgtggttgttcctgacaaactcttctgagggctcccaggtgacgatgcgtgacttgaggatgccgccctccctgggagacaccacagaaaggtcacttccctggcacaccccaatggagcaccccagtggagagccacttcagaatgggaagtttgagctagtggacatactgttttgttttgttttttaagagccaaaatatttgacaaacagaaatgacatcccttccctctctctgaggcactttggaaaaatgtccacatgaagagtgaggaagatattttatatttttatatttattttttaaattaattacaaagtaatacttgaatactatatataaccactgataaaaatgcaaaactacccaactttaggaaataaaaagtaaaagcttgtcccccatcccatgcccgcactcacatccctcgcctgtcctgccggcgacgcctgacatttgccattcgctcgaccaagaatgaaggcacctcgctggctgcagtggtcattctctgacagtgctgggaaaagcaagcagccctgtgtacgccatctggtcagggccacatggagccaagtacctgaagggaagtcttcctcctgaaacctcatccaggacctgaaccccacaggttccgccacctcacaattatacatgctaacggagggagcagtagccaaacaacccaaagaagatttctaccacatcatggtttgcctttggattttaaaaaggagttatttatgttaatattaaaatcagtctgcattctctgagcacaaaccaacaaaaagttgggttagtgtgcttggtagatgttgaagttaacaaggtggttagaaaatgccaaatgggatacaagcattttgtgggaaatcctcacatggtaactgagcactaactgcattttcatttgcttttccaaaacagacaacccaaattttatttaatttatatatttttttaagagacagggtctcacccaggctgcagtgcagtggtgctatcatagctcactgcaaccttgaactccttggctcaagtgatcctcccgcctcagcttcccacgtagccgggactacaggtacatgccaccatgcccagctaatgttatcaatccacagctctaataatgaaagcacgtcaatctttcaaaaacatttattgaatacctgttccttgcagagacctacagagtcatagacaaaaataaaaaaaataggctctaccctcgaggagcttaaaatcttactgagaagacagaagcaactgaaatgcagtgactgaagaaaatgtaaaacaaggtcacaagggtatttttgtcataggcaaattgaggacataagccattttccatagctatactgaattcctcttcaaacccatatactcagagtttgggctgaatcccctgatgaattttatctatattgttccagactccactacctgtcttttttcatgatgcatggaggaagtcaagcccagtggttacttctcccagtatgcactctgcaagcatataatcagagatactggcagctcccccaggccctctagcaggcagagaagggagcagcagcctcaccacctgtagactgtgcccattctattccaggctggctgccagcagcagcagctcacagcagttcctagacaggctacttgtctccccttactaggctctgacataacacacagaactcagtgaggcaaaaaagctagaggaagcaaagatggaagctatgagaccctagaaagaacaatacctcctccaaattggtgtatctatcagagtcagtgtaggtaaagattcgtcggtttttcttgccacccgaattctccagcttcaggatctcctgacggtactgataatccaaaggactctgacaggctgtttcattttggtacagatctacttcaaactgaggttaccataaggaaacagagatgtgtacatcattataatacatcaaacttttgcttctgtaactgtttaatcaaatcagttctacagaactgatgctatctgacatgttttcataaccaacactaaactaatgaatggcaggggaaccaagaacattagagctaaaaggaaccagactgatagtctaatccaagtctgctattacagatggcatatagcccagagatgaaaagttcctcacccagaatcacaaaactgagtagtggcaatccctatgttacaatgccctttaaacacaacaggggaaagtataaactgttacaacctgtctggaaatcactttggcaatatgtatcaccagccatgtggaggtagaccagatggaatagacagagaagacaagagacactggctcacctggctaaagagcttctcctgccacccaatcacaatctcctcctcttcgtcttcctctgggcggtgtccacctccaaagacaacagagtgaatcaaatgcttgagccaaaccagcaccacttcttgttctgtggtttattataaccaaagtccctattcttatatttgccacaaaaactagctggaattcagcaatttagtaagcactcaacctagagaaatgctagagaggctgtatatgagagttagtatgagtagaagccaagattagaacccaggaagtcttagtcatgactctaatttgaataaaagaaaataccccccaggaatttttttctgggggggatggagtctcactctgtcacccaagctggagtgcagtggcactgtttcagctcactgcaacctcctcttcctgggttcaagcgattctcctgcctcagcctcccaagtagctgggattacaggcacacaccaccaacccagctaatttttgtattatcagtagagatggagttttgccatgttagccaggctgatcttgaattcccgacctcaggtgatccacctgccttggtctcccaaagtgctgggattacaggcgtgggccacggcgctcagcccgctccaggaaatatctaatctaactggatataagaaactgaaatttagatataagctgaatagccagcccttcctcagtcccaactgtctgcatttgctagaaaataaccctggcatttttatctttactatttctaaagccatatatgtagaatcacaaacactgaaatttaggagaccaagtgtaaggagaggacagtgaaggcaaataaatgattttttaacagaaccaaatctggctgaatgcagtgactcacgcctgtaatcccaacattttgggaggctaaggtgggaggatcacttgggcccaggaatttgaaaccagcctggacaacatagcaagaccttttctctactaaaactttaaaaaaaaataaactgagtgtgagtctgtagtcccagctagttgggaggctgaggcaggaggatggcttgagcctgggagaccaaggtttacagtgagctatgatcataccactgcactccagcctgagcagaagaatgagattctgtctcaaaacaaaacgaaaacaaaaacaaagaaaacaaatctaatctaatacactcttgggtatgcctttttcagagacacgtttcacaacctgtgagcccacactcttgcccaggaacagctctgaacagaaagagaaacaataaaagcaaacagactagtgacctgacaacaaccactctgtcctctcctcctcattcttttggtttcccagataaggaaaaccacaagaacacagttgatctatacatgcacatcatatgcagattttgcaagcagtctccagtttaaaaattgtttttaaaagtgtttatatgtgtattt[140 bp omitted]ggtgaaaccccgcctctactgaaaatacaaaaaattagccgggcgtggtggcgggcgcctgtagtcccagctactcgggaggctgaggcaggagaatcgcgtgaacccgggaggcggagcttgcagtgagcggagatagcgacactgcacttcagcctgggggaaagagcaagactccgtctcaaaaaaaaaaaaaaaaaaaaaaaaaaaaaaaaagccacaaatagaatgtaggttgccgggcaactctataacatatcagaagtatagtatttgttatctcactacatttggccacaattctgattagtatcataattagtattagatggcacatcaccaccgtaacacccactggcagttggctgaggcctaaaagtggccaagtctatgaggtccttcccgagctcggcagcaggctgataatgaagaaagttgcttgatgtgattctttgcaggtggactctgtcaagaaaagcccaaaatattcgttaccagacacgcaaccaggagatgaacacaaagcaaggatgggggaaacaaaacagaggaggtagggttgccaaggtgtgctgggtgcagacaacggagaggaggtgggtgggtgcgccgtcctatggggaagaatgaaggggagagggtgtactgggggcacagggctttgagaaactgggagcaacaaagacgtgaatggacttgggtaggtctgtaaggggttcttagaggctgtgagtggatgggggtacggatagtgaaagaagtggggagcccggagaagtggtcgggattgtaagcagaaagtggggacctcagaacaccgagctcaggttggaatgatctaaggacacaaaagcatggggcctcggggctggggcggtgcgactaccggaggcgcaagttgcgcacggggtcccgggagcgatacactgcctccccggtgtcagtgctccagacggtctccgccatgacagctgcgacgcgccgcgactgcgccggaaagcgcgccgctctgttttcctggcaacggagacgctggatcgggaggcgacggaggtgctgcgcgcgcaacccgccgttcccgtcacggcgccacggtcgcagttggccacacagtgcaagtgcagcccaagccgaacgcccaagagggctccggggtcctaccgatcaccgcttaccatgtatgcgataaaagctcaccgaaagcgggacctcgtgcgctgtgcaaatgaggaaactggcacagccatcagcccacttcatatagacagatagatgcagaaatgatgacggggaccaggtggcctgagtcttcgccctctaccttttccaccatgccacactgccttccacccaacgcgtgaaaactttggcctgaaaatcgggtgatgtgactgtaagaaatgcacccattattcccaaaggagtcagggaaggtgatggcccttagccagacaagaaaatatattcttggaagacaaaaaaagtgtcagaagatttattagtctttgtgttgatattcactgagcaaagaaagaaaaaacaaggaagtcaacagtaaggaaggaaacgatgttattattgaactgattcttaccttgtgtatgttagttttggatcattaagccactttgttactgcactggcttcctgaaaagccaaaaaagtgacattcacaagtcatgcttcgttgtactagcaaaggaaggacatgctgtaacctcacgtctggcgtcccggcactttgggaatgtcaacatttatcagccttgttcacatctagtcctcctccaacaaagtaagcaattgtcccctgaactcgggaatctcatgccagtttgatgatttggcattggaagctctgggtgccatagccactagttgtgtaacaccgactcaccataaatagcaccatttatttaggatctagtgcagcttgagcacttttgtttgcattgtcccaaatccttgtagaagcctctcaaaaaggtacttttattcactttaaaaatgaagttcgtgaaggccagggtttaaaggacttgctagcttgcaagtggtaaaagtactgggattctagcccaagttcttctgtcttttgaagcctaaccaccttccagtttgcctcacagcctctcacctaccaatttattccataaacgcac[138 bp omitted]gcctc[224 bp omitted]ctaagaaattgtctctccaatgtttccttttaaaattgtgagtaggcaatctgtgccacatgcacaacagctgataaagtggagcctgattctagtttaattttataaccaaatctaacttataacaaagttaatctgacataattatatgcaaaatagtttctataccacgttatggaaatataagctatttgtgtaagcaaccataattagtattatttttatataggtaaactaagttttcatgttttgtttactgatttctatgaatcaggatccttttatgtttaaatattcagcttattggtcttaagtacatttaccttgtttttcaaccatcatcaccatccatcgccactactttcttatttttgaaaattgaaactctgttcccattaaatagtaactcctcattcccctcttccagcccctggcaactaccattctacattttctctctatgaaatttgactgttttagatacctaatccatattgtagcatgtgtcagaatgtccttttttttttttttactttaaattccggaatacatgtacagaacatgcaggtttgttacataagtatacatgtgccatggtggtttgctgcacctatcaacccatcacctagattttaagccctgaatgcattagttatttgtcctaatgctctccctccccctgccccagactttgcgacaggccccagtgtgtggtgttcccctccctgcgtccatgtgttctcattgttcaactcccacttatgaatgacaacatgcagtgtttggttttctgttcctgtgttagtttgctgaggatgatggcttccagcttcatccatgtccctccaaaggacatgatctcattcctttttatggctgcatagtattacatggtgtatatgtaccacattttctttatccagtctatcactgatgggcatttgggttggtaccatgtctttgacattgtaactagtgctccagtaaacatacgtgtgcatgtgtctttatagtagactggcttatatttctttgggtatatacccagtaatgagattgctgggtcaaatgatatttctggttctagatccttgaggaatccgcacactgtcttccacaatggttgaactaatttatattcccaccaacagtgtaaaagtgttcctatttctccacagcctcgccagcatctattgcttcctgacgttttagtaattgccattctgactggtgtgagatggtatctcatcgtggtcttgatttgcatgaaccaggattcttaaaactgagatccatgagtgggattcaagaagtctatgaatcctttccctagaattctgaatgggggatttttctagaaagagttcatagcttttatcagattctcaaaggagtttgtaccatgatatcaagaatggcttgggccagacacagtggagtttagacccaggagtttagacccaccggggcaacatattttttatttataaaaaatttaaaaattagccaggtttggtggtgcatgcctgtggccccagctacttgggaggctgaggtgggaggatcatgtgggccgaggaggtcgacgctgcagtgaacataatttaaaaggaagaagtaaaattgtgtatatctacatacaatatgaacctaaacaatcctaaagaatctacaaaaatgccagcagaactaatagggttatagaatacaaggtcaatatacaaaaatcaatggtatttctatatactaggaacaaaccatttgaacttgaattttaaaaatcacagccatttaaaataacatccaaaagcacaaaacataaaattaacaaaatatgtgcaagccttgtacacttaaaatgtcaaaacattggtaagatgaagacctggataaagtagagtactataacatgtccatggattggaaaaatctatatcattaaggtaattatcctcaagatgatctaaatctcagtaaaaatcccaccaggtttctttgtagaattgacaagctgactcttaacat[131 bp omitted]tggtgaaaccctgtctctactaaaaatacaaaaattaactgggcgtggcggcatgcacctgtagtcccagctactccagaggctgaggcaggagactcgcttgaacccaggaggtggaggttgcagtgagctgagatcacaccactgcacaccagcctggcgacgcagcaagactctgtctcaaagcaaaaaacaaaaaaaagagtccaaaatagatctgtacgtagatggcctatcaatttttgacaaaggtcccaaggtaattcaatggagaaaggacagcattttcaacaaataatgctggaataataaatccataagcaaaacaaatacaaagatgaacaaaattcaactccttaccctacacaatttaatgaattgaagcaaaatggatcatagacctaaaaagtaatagttacaacaataaaacttctagacagaaacatagggacagatcattgagatcctgagttgggtaaatattttcttaggactcaaaatgtacaaactatagaagaaaaaatcaattgtcatcaaaatgcacaacatcttttcttcgaatgacactgtcaagaaaataaaaagacaagacacactgaaaaatatttgcaaaacacctatctgataaaggacttatatctggaatatatagtcttacacctcagtaataataatacaaacaatcttattttttaaatggtcaaaagatttgaacaacttaccagagaatatatgtgaatgacattaacccaggaaaagatacttgatatcattaatcatcagaacattacatattaaaaacacaaagataccacagcacacctattacaatggctaagatttaaaagttagaccatattaaatgctagtgaggatgtggagcaactggaactctcataattacttatcagaatgcaaaatagtacagccactttgggaaactggaaatttcttataaagtgaaacatttacataccatatgatccagcaatctcactcctaagtatttactcaagaaaaatgacaatatgtgtccacaaaaaggcctgtatgtaaatgtgtataacaacttatgatagtaaaaatgggaaacagtccaaatgtccatcaatgtgtaaatgtttaaataaattgtgtaatttgtataatatttatacaatgaaatactactccataataaaaacaaagtgactactgatacataaaaccacatggatgaatctcaaaatcattatgctcagtgaaagaaaccagacataaaagactatatactgtacaatatattcgatatggcattctttaaaaaggaaaaattatagagatggaaaatagatcagtggttgccaaggattgggtgtggggatagggattgagtataaagggcagtgtgagggaattttaggggtgatgagaccgttctaaatctgtggtgatgctaaacaacttgttgcatttgttaaaaacctacagaagtgtatcagtaagtgaattttactgtatgtaaattttaagctatttaccaggttgtgaggggtacttaaaatggaatgcagactatgacaaatgactctgttatagatgactcatctaaccacactgaagggggtgaggaagcaaagagccaacctaagtaactttggaaaactattttggctgaaagctgaaggatgaagacagaaagatctgtccacaaacactgtactctagttggtaaatttgttcctcagaggagttgagttagcaattctaaagctactttatgtatgtactatcactaaacaaataagtaaatatgtggtagataatgagtaccacttctgtgtctgagaaggaagttataaataaggaaaggggtgaaggcaagaatggaccctgtgatgctggatcagagttggaggtagcagtaaaaattcatgggtgtttaaaaatatatgtataaataccacttggttgagtctttttttaagaaataaataatagtaataa[133 bp omitted]gaaaccccatctctactaaaaatacaaaaattagccaggtgtggggtacatgcctgtaatcccagctactcgggaggctgaggcacaagaatcacttgaacccaggaggtggaggttgcagtgacctgagatcacgccactgcactccaacctgggcaaaagagcgagactccatcacaaaaaaaaaaagaaaaagaaaaagaaattttaaaaatatatgtaaaagagtcagaaatgtgtgtgtgtgtgtttatatatatatatatatatatatatatatatatatatatatatatatatatatgcatgagttagtatccacacatgtaacttctagctctgtctactgagagagcccagaagcagtcactcctcaacagaaatgagcatacctagtacccagaccttggtttctaaagaccattctccactacaaaggaatcagggctccttggagaattcattgattcccagagaagcagcaaaatgaaacttcttagacacttcttagctaggtaactcctatcagccaagaacaatcctgatatgggtataggtatgtgctgttaacagtcaacatagttagcagctggcaaagaagatcttggtaggacaccaacagcatctgctacaagtacattttggggaggtgaccccagggaacattggattgggagtggggctaaactcaggccaacttactcaggacaccacaatcatgagtatccctgcctcttcccaggccccttccaggcagtgtgccaacaggtagaacaggtgagactacatgagtattaccatgttgatattaccagagtcagtaggagaataaaatagttcagcgttacccaggagctgagcatctgaagcaggtcgcttgtatatcctagccagatcttaaatgtcttttccaaagaaacatactaagcttctgacaactaattgctttatcttgagcagccctgttttccctacagtgtccaacaggttagctcaggtctccagtgatgtgtcaagacttggggcaataggagtgttctaaacagtaggacactgataatattggctcctatggctcctcctcctcaagaagaggattcgattttttagaaatacagggactttacaatccaccttccatgctcctcccattcttggtattctcctggaaatcacgaagaaattaatctcttcagcaaattctaataagccagtcttctccttttctttttccagaactttccaccaactatgagattctttcaagtttgatctcattatagcccactgactttttccaaatcatcagtgagcttttgaaagtatacattcatatttacccaataattttaagtcaagattttggctcttgtctcaaaagaatcatttggcttcagctattagaactgaaattaggtggttccttgaaattgctttgagtaagaattctcagcaatcctgtcagagactacaagatatggtagttaagagttcgtgccataattcattaattaattcacttaatttattcaaaaaaaattgtgttttgatggtcttggagtatgtagtatactaaacagtctctgacctcatgaaatttacattatggttggggtaggtagacagtaaacaaacaaaaaagcaaaacatagtacaatatatggtggtcagttccacaaagaaaaataaagcaagaaagaataatgctatggtctgaatgtctcttccaaaactcatgttgaaacttaatccccaatgtggattaatgaattaatgagctgatggattaatggattatcatgggaggggaactggtgagagacctgagctggcacatgcacactcagcccctcgccatgtgataccctgcaccactctaaggagagtcctctccaggaagaaggccgtcaccagagtgacccctcaaccttagacttctcagcctctagaactgtgagaaagaaactctttttctttatagggatacccagtttcatgcattctgttataagc[134 bp omitted]accttgtctctacacaaactaaattaaaaaaatttagccaggcatggtggtgcatgcctatagttgtagctactcaggaggctgaggtgggagtattgcttaagcccaggagtttaaggctgcagtgagctgtggtcgtgccactgcactccagcatgcgtaacagagcgagaccctgtctcaaaaaagcaaaaaaagaattgtagaaaaagaagagtttgacattttttaaaagggaaatctggaaacactaactaagactgtgatatttaagcaagtactcaaagatggtgaggaaatgagccatgtggatatctggagaatgagcacttcaggcagatgaaacagcaaatgcaaagctgggtgctgggacatgagtatattttgtctcaactgtcttacaactgatgcaagatttttctcagccccttcactggacttacagcaggggtaccccctctactcagcccaccacgctcaaccccttgcaggagggagcacatgagcgagtgaatgtggggtccagccagccactcctagtgccaacacaagagcaacctccatgcagggcctgcagaggcacccagctaagggtgcccaaaatcccaaaggcccagaggggttgttacagtgctcctttagttccactgtccacggatagcggtgtgttaacagttcagttggccccttacctcatcacgtggggaagctgccctccaccagtgagggcaaagggccagtgtgacaacctttctgggtaaagtgtcccaagctcttgtccagggtccaagaaaaatgaagtcacatggacagctgaaggatggcaaaggtggagaattttagtgaatgataaaaatggctcagtggataggggaataggagaggcaatgagaagggcaggtcatcttccccaaagtcaggttgtctcttcacaaagtcaggagtctcctcttctactgactgagcctggggtctttataggcacaagatggggagtgcgtgctgattggtctgtgagtatgcaaaaaaagttaaagtgaaaacaccactcaaaggtgggcatgactgtgtagaaaaccaattaggaaaagctagatatatgtgaaataggtgaaggatggggatcaatcagaggaaagcacatcaaacaggaggacaagttctcaatccagtccaaggatttaacttgtagcttggctttcaggatttaaattgtcttcgacttggaggtgggtacccaaccctgtctgtctaggcatttggctgcctcctgtcactatcattatatgtgaataattagaataatttatattgttaaattaaacctgtctccaagctccccctcagcagagctgatgcgatgttcaatgttgttattgtggccccttccacttcctggactcagtgcagagttcctacgccccagaaaggggcctccaatccatgctggtcagtgctggggtggtcatgccccaagctcccagctgagcaggctgctctctgcttaccgtgtccatcttcctcctggtgactaacttggcctccaaagaccacagcctatagagtccagtcccagatatccatgtgccaccctgtcagaggtccatgcaggaattctgccccgtgcaggaatgctgcaagagagctgaaattccctgtttcttggtcctgcatctccaaggtaactaaccaatccctccaaccctataggcttcagcaacctaccagtttcctctccattctccctcctccctcccccaccccccaccgtacctcaattgagctccctagccctgtgagctatgtttgtttgtcacttgtgtttttgtttgttgttatttgtttggttagtttggtctattgtttatttgcttgtttattttgttttttcaaaacaaaggcttgttaatcttcccaaagacaaagaaaattctgccctccaggacacaaagctttaattgctctcttgagagagggtgaagggaaaggtatttttagtctttgaacggaagaaaattaagatttcaatcgcattaacatctctggaatcctttcccagctctccacctccaggaccaccaggcactacctctttccaggataccattagttcctaccttcgtcattgcaacagggtgcctcctgaccttcctctctgcagtcctaccctccacctcttccccaccctaaagccaagtgatctttctacagcaataatctaatgacccttaaaatatctttgccaattaaggaacaggcacatgttccaattcaggccagtgagacgtaagaaaaagcttgccaggatttctgggaaagctattctttctcttctgtgagattctctgccttcccctgcagggggttgtgtgccattttgcctgcaagggaaggatggagttgaagctgagaggaggtaaagccaggagaactgcagggtgaaggaagccaggcccattgaagtaattcaaccctgaagtcaaccctatccctggattcttgttagaggtttttttttttttcaaatgatcaaaaaatatggaacaattattggttgcatagcaatgtgaatacttgacaaaactgaacagtacacttaaacatggttaagatggtaaattttatattatgtgtattttaccacaactaaaaaaaattacaccaacaacagcaacacaaatatggaacaaatcgtataatcaccatccatgtgcccagcattcaatttgaaatttgccttgttagttaagccaatttgagctagtttgttggtgacctgggcccagcaaacgcatgctaagtaatacggaatgtgtgcctggaagtaggcatgctgcaattaacaggcttatacttgatggaattggctgaagagatagggcttgctcatgagctagaaagttagcaatcctatttaagggattgtgaaatagaactggtttctctgcctgttgaagtttaatgtgcaaaaaaatcacctggggatcttgttcaaatgaagatcctgatttggtgggaactgagagtctgcgttcctaacaagctcccaggtggtgccactgctgctgagccatggaccacactttggataggaaggagttacactgatgtgtctgggaatggggaccacatactatgcaggctgttgcattaggaggatggtggggaaaattcaggatattggattgtgttaccaacttcttacagccctcagtaaggttctacaagagacaggcccttagtttcacactggcctatgtgaaaacaagaaaatacatctctgttaagagaggttctctcttggcggggcacggtggctcatgccagcacttcgggaggc[132 bp omitted]tgaggcaggggaattgcttgaacccgggggcggaggttgcagtgagccaaggttgagccactgcactccagcctgggtgacagagtgagactccatcaaaaaaaaaaaaaaaaaaaaaaaaaagaggttctctctgcctatgaactgaaatttaaaaatggctgaaatgtgatcacgtgactatgtcatcttggtcaactttttagagtctgcccatatttgtagaatgaatgcatgaatgagtgagtgagcttgctataagaaagagctagataattagagcctcccagcaatgaagcaggttgccatgtaaatactgagctccccaaccccggaagtgttcaagcagtgacttgatgaccatctgtcagctttaatgtaaataaatatgacctggggattttgtgaaaatgcagattctgatttggtacatctgggtggggcctgagattctgtatttctgagtagctcccagaagattccaatgctataagactttggatcataccttgaggagcaaggatgtagtggggaatcctacagagggtagaaagttcagctagattagtagtttccaaatctacccgtatgtcagactcacccaggagatttattagaaatagaggttctccaactccaatgccagagctggaattctgtagaccaggagcagagtctggatgcctgtatttttcccaagctttccactgattcagatgcaacctttgggaatcactgaaccagaggcttctgaaatgttgttcaaactctaagcttactttttaaaagaatcagacaaatataaatcatgatgaggcaaagccaggctgactaaaatccccttgctatacttacttggcaaatatcaccagggtcaaaacactgccttgttatttatgagtcctagatctatgcttaaatccatttctagagaatgtcatatttcctatatttttgcagattggaattacattatgctcttaaagtagcccaattaatgatttcttgaaccccagcaacttgtagtgaaacaacataattatgttaaaagagggaacttccacattaggtttcttggagaatgtttcaaaagataaaaatagcaaggaaatctagggttgtgtgacacatcgaaaacatcccacaaacgggaatcttcccaattgagtctgttaggtcatggtctcttgctctcattgcagctgtgagcagggaattgcagatccctaatctgaggctgtaaagttttattgctacagatttgataagttctaggagggcagaatctcaggcagatttgatcaatttctgtttttcttacccattcatcattttctcttttgacatggccacaaatgggagggttcatgaaggtgggccagcaccacgttttagaacttggggctggagggagaggctggacttttaccccactgcaggggttagaagggccagttgaatttgtaggatgtgaaatccagtaaggaccatgattaaattgccagcagtggcagtgcctcgggcactggatcgaaattcagggcaaaatttcagagtttagacatggaaagctaacagtggggccatcacctcatggggggccaggtactgaagtcaaaatgggcctcctgaaatctgtagcaagaagggaaaagagaaaacatgagttactataagcaatgcaggccggttttcagctgtcaggctaggaaattctgctaggctttatttcagcagacggacatcatcagctatgcagtatccaggtccacagggacttcagagaggtgggagcaactagcctaggttgccgagttcaagagcagaaaccctgcctgggccagctgttgtcctcaggctgaagatggactctttcacatccatgtgaccaaaagagggcaaaactagagttggctccttggggacagggtggtgccatggcccccatcatctccttttttcttcccatcagatagcaagcagctcattggagagccacacagtcaccaggacagagagaatgcccagcagcagaagccaaaaaaagaaactttccctttctgtctcctctgtctgtggcgtgcaacccagctatgaggacgtggggttgaagccatttcctttttcagtttcagcttctgaccctcctcaggattagaagtggcgattcagaggctgggagggtgaaagcatgacttctcaagaaccagctcgtgctgaagtcactgctcaccttcctgtctcagggatgctcctgatgctaatgacgtcgtgtgaatcatgctctacgtgtctgcatgcctgagccgagcttatcctcatggcaccctgtgaggcaggctgctgctcctactcccactcaccagaagaggaagccgaggctcagagactgagtaactcttgaggttacacagccaccgagcagggtcattagggccctatgagatttccttccgactccgctctgaactcactctcgtaggcccaagctgggcgcctcccccagggaacaccgtagtggcccggaaaacagagagcacaggttacatttggctcacattcttggtgtgtccactgtaggttgctgtgaagtaaattttaaatttttatataaaaacaaacagataatttcttgagtgggacataaaagcatgaatttgaaagttaaaatgtaagatattgaccttttacttaataataatgtaacaatattgctttattaactgtgacaaatgtaccattgtaaaataagataatcataatgaaaactgggtgtggagtgtgcaggaactctgtattatctttgtaataatatggtaaatctaaaattgttctaaaataaaaatttttctctttaaaaaagtaagatatcaaataaattttagaatctcagtttccttcaggggtacctggtcatgattatcttttgttagaggcatatcagaggccatgttgctcgctgagtagaaggacattctacagtgtacgcttacagcctcttgaaaagcctgtattcattaagagaagaaaaagagggtgggacagtgaagattctttcacttcctctccccagcctctgtccccttcttagcactgtgcgaagagtgagaggtaataaccacttcaccctccccaggtttccaccagagtggaaggggttccatcacagacagactatttgagcatttcaccccattccagcctccaccacaatcctacaaattcaactggcccttctaacccctgcagtggggtaaaagtccagcctcttccagagacag[131 bp omitted]ataaataaataaataaagtggggggtaattcagggcagggcagaaccagaatgtggggaagtcaaggaagccacagaggcaagagatttatgaaggacaaatggacaggattcagtgaccaagaagatgggaggaaggggaggaagagaaaagagggaaagaaaaaagaaaaatgcccagggtgtctccctggtttccaacttgagtgacagagaatgatcacattcccagcagaatttttcttctttctcaacaagattcttcctgttcttttgtttctggttgtccctcagaactaaggagaaacagcctttgggatagttgtccccctaccccatcccagctggtcctaagagtaagaacataggattctcatcccccttttatataaagagaacctgagggtatgtaatgtgtacaagactgtacaatgaggcagaagctcactggcactgggacctacaagatctactgattcacaattgaattctaaacatcacagcccaagggaaccaacacaattacttagtggacccatttctctttccagagaaggaaactgagacctctgaataaagagtaattttcccaatgtcacatgctgctgactagcaagctaggactagagcctggcttgctgagttttaataatccagtgctccttgcattttcgctagttgctttgtcacatctgtatgcacgtgtgtgtgcaaacacatacacacacacatacacatgcttgcttgcttgagaaacagggcattttattcgcatgatattttctttatggacttatcacaaagcatatcctcagactgctcacagaataacaatagcaattcaagattgttttttgtttaaaatcctgtgtttctttatttgtggcttaagtgggaattggtttattgccccatctctaccctgagcaactcaggatttattcagactgtcttgctccattgaggtctatccccttccccagccctatgcctacattaccctgccaaggcagggaacagatctgacagcttttttgcttaagcaaacttattaaaattcataatttgtcaactaattaggaagagagaggattaggagtaagaaaaaaccagaagcacatactattaggtgctcagtgaatatttaagaggaacagggaaagagggaggaaaggaaagacaacactgaggggaaatggttgaatggcattaactgaaaaaaaaaaaaaaaaagatttgccattaatgaagagaaggaagagacagtattctgcccacccaccaggtcggttcccagggaagcccttcagtctcagcatgctgtggctaagtggaaaaattcattgatcataggtttgccagttggaacccttgtgttatgccaatctcagaagctaccaagcatcagatcaattctcccactaaaaaatactaggaggccgggctcagtggctcatgcctgtaatcctagcactttgggaagccaaggcaggaggatcacttgagcccaggagttcgagactagtctgggtaacatagggaaaccctgtctctacaaaaaattaaaaactagtagggaatggtggtgcatacctgtagtcccagctacttgggaggctgaggtgggaggatggcgtgagcccttgcactgactggtggttgcaccactgcactctagcctgggaggcagagtgagaccttgtctcagaaaaaaaaaaaagttgctaggagaagataacagagcctcctcctgtctgctagagagacatacaacccatcccaaatatttctttttctcatctataaatccctcctctctctccaaagggggctgcctggcaatgtccccatcccttccaacagctcatgccgccctgggacaccattcagagaagctctgccatctgcacacccctccagaggccagggacagcttaagccagagtgcctgggttcctcccttctctggggtagaactagtggatgaatcccaaaaggggtaaacatgggcatatagagccacccttgggacaagaagtctgtttgtttggtgttctaggaaaccaacaaaaggaaatgcattttagccaggaaagaaaagaaaaaaaacaaccctgcccagctatgaatgacagccaagccagcagacaaaggtgaaaacagacagctaaggaagggactagctatgcgcccatgggagagagcacctgacatgggcccagtgtgagagctacaatcaccttacacaaatagaatggtcactgtgttaccaaccatgagtatcctttggatcaaccaaaggttgtgtatgcagcatgcagcattctaattctagaaggcgacagaggtgagccagctatgtccaaaatcagtctcatttataaactgtgtgttcctgggaagtatgtgtgcatgtttgtgtgtgtgtgtgggtgtgtgtactgtcatgtgccagcgatagaccttatcttcattgggtactccctgctgctgctgcttttgctaaaatatcttggactctgcactgacatatgagaagctattggcctttttagctttctcctgaactttctgccttccactctccatttctcaggccaatttgccattcccacatgggaagacatctacctgtgctacagatttgactagactgagataaacccatgaaaacatgtcatcacatgtcagcaaagctctcaaataaaaattagctatagaacaataggcatgtcactgtcagattgactgcctccaggtgtgcttcacggccaatatcaaggaaggtccttactgggctggagctgacactgccccatcctatttgacccattacagaaagaccaaagctaggacatatcatatcatgtcataacatgataaaacccgggaataatcagacctgtattttgctgttaccctgaccaataagtcactatattttgtacataggaagcaatgttatcccatagggtcttctaaaaggaagttccatcttcagattattcagaaccaactaggtcaagatctgcctaacaacacagcttcctgaacatattaagcataaaactcagaggcaagaaccttgagaaacatgtgccaaagttcagggaatggtcagacacagaaaaacaatgcttggctaaggagctgaagtgtgtttcaaagaaaacaagaagagcctgatgtctcattcacctctcctggacagctgccttcttccgagatgcccagcttatttgcctggattcatcacgagagaagtagtttttagatatattccaccatctagagaaaggaaatatcacttttttgaaggcgaaccaagaagtctgttttggggttgataaatttctgacagttgctcccagagtattttcaactcaaagtataatttcataaagaggcttattatgttttaaattgtctgtctgtaaaatatactttcatgaaattttgttttctcggaatcttcctttttccttcttgtatgaatctaatgaacttgaatttccaaagtcattgaggtaggaaaggtatgtaacattatgcttgagctttaggtcaataatttatacgatagtggtggttttgttttgtttcgttttgttgagacagagtctcgtcctgtcacccaggctggagtgcaatggcatgatcttggctcactgcaacccctgcctcccaggttcaagtgattctcccacctcagcctcccaggtagctgggattacaggtatgcacctccatgcctggttaatttttgtgtttttagtagagacagggtttcaccatgttggctgggctggtctccaactcctgacctcaagtgatccacccaccttggcctcccagattctggagttttttaaatgggtcaccctatagaaggcatgaagtcatagaatcataataatcaccaaaaccaaccattgatttcaatactagaaaatttgagacaccagaaggtgaagtgacttgcctagagccatacaatggcagaggcagggactgcaacccactatgaaagcttagggctcttctcaccctttggtggccaaaagtattttgaaattttgaccaaaaaaattaatgtttattgatcactttaaatccaaaagatgaatccactggattccacagtaaattgggtggaatgtaagggagggatcaaagggcagtgaatatatgaatggggaggagaaccatttagctaggtgcaaaagtaattgcggtttttgcaatacttttgcaccaacctaataattgttcataattctaagagctattcggatcccattaggagcttaaaagggacaaatgtgctcagggcatgcagtttttgccttccggaactagatcaggatcatgcatttaagctagaaaatggaaagaggagttgcttcacccacagtcagtgctattgcatcaaccaatccctgccattctgcagtttcctggtgtatctgcccggagtcacacagtctttcctgctaagcctcagcgtctcctccaagccacatcaaaatctttccttctgggcctttcccagaagtgaattcttgctggaaggtataaaagaccagctcctccaagcagagcaactccctggctgccgtgaaaagacaaggcactgggcaggtaagactcgtcaactttcatctttcctggtttctgcaaagttgatgatgaaatttcctaacgtcttctcagaaagcttaacactggatttagacttgtctctatcaggcactttctggtgccagctttagccaccccatggcacactcctcttgtttggtataagagagaatgtaattaagcctccccccaccactgtgggggaaaaaggcttttctgtgtctgaaaactatgtcagagaatcataaactcttagggctggaaggtaccatagacctctcttatccaccttgtttaggaactgagacttaagcaatttaatgtgtccagagtcacacaggaatttgggggaaaacagtgacagaatggtgctccctgtgctgttcttgagacagtgtgatgaaatctggcctctccactatagtggagattttgcagtgttttaaggggttccctaagccggagctgtcaggtcttcatctcatttccagcatctcatgcctgccatctgcagcagatccgaccatctagtttgccctcaatgtctagtcctagctgtcttaagtgccctgtggacacctggctctcaagcaggtgtgtgacctgtatgcagcggtagtaggcaggcttcattttgggggaatggggtggttaaattatatttgttttttatgcaattgtgtgcctcaaatctttcagttgaagtagattatttccgctctagagggcttgataagagctatctcttcattctcatcctgatcttggagtcactcaaaagatcaagagagtgttcctgcaggtgatggggcaagaattatggctttcctattggctcactccaccaccctccacagggctctttacaatcatggaagagaatctcactgacttcatcccttctcaggccttccccctatctccttggtgactgctcagcgacattgagaaccaaagtctggaaggccttggtactcagagtgtggtctgcagaccagcaacatcatcatcacctggagcttactggaaatgcagactttcaggccccttctatgaccttctgagtcagaatctgcatttaccaaaatccctaggtgatagtaggcacattacagtgtgagaggcttgccgagggactatctctgccctctccctctgcaacctccagatgctgaatttctctgctctaggagttttattcattcagcatgcacccaacacctattatgtattgacatgcttaggtcctgggaaaacaaataaataagatggagcccttgaggagttcatggtctgataggggaaacagatgtgaagacagtaatatgagatatggatgaaatactgtgggaggacagaaaaaggaacgatctaacttttcctggagaaaactggtaaacttcacagaggaggtgaaatttggtctgggttttgaagaatgaataggagtttattagccagagagggtattgtatagggaagagcatgagtagaggcatgggattgtggaccagcctggcatttgaggggcaaaggctgtggctctgtctccagatagtgcttcatgtcccagggaaggctccaggctttgctgcaaatcaaagggcttgggaaatggtttctgcactcagcatgttgataagaatatggataaatatctacacatcacaggagcctcttgttggcctcttacactctaaagccccaggccctcttgccctgtgtggttctggctgaagacagtgtccctctagaatctttctgcacacccccttttcagtgacatgaccttgtattcacctggctctgatttttgttcatacccgtccctcacacccaccaggaacattgcccaagacatgggaaaataatttctctctggccttgaagtccccctcctccactttccagtgaggagagcatgaagggggtcctaaagaagaggagaggagaattgaatatttaagtattgtttcctgttcaaatttctcaactttcatgtcttcttctatgattttgtcttcctcaggctgtctcagatgatgtctttttaaaaaatggactaattttttactttgtgtttgtcatttattaggaaacgcattagtcattcaaagaacaatataatgaatgtttgtgcccacagccctctttaaaaaaatcagtgatatggtggttgccaggagctagggggaaggggaaatagggagttggtgttcaatgggtatagggtttcagtttttacaggatgaaaatgttctagagatccattgtgcaacatgtgaatatacctaacattacagtactgtagagtttaaatgactaggatgctaaattttatgctatgtggatttttgttgttgttgttcttttcttttcttttttctttttttttttttttttttttttgagccaggctggagtgcagtggcgcaatcttggctcactgcagcctccacctcccaggttcaagggattctcctgcctcagtctcccgagtagctggaattgccggtgtctgccaccacgcctggctaattcttgtatttctagtagagacagggttttaccacattgaccaggctggtctccaacccctgacctcaagtgatccgcctgcctcagcctcccaaaattctgggattacaggcatgagccaccacacctggccatgttttttaccatagtttgttttttaaagtcaatgataccttttcctccaaaaccatcatctctgtttgtctgaagggcagatttctgctaactcaatgaaccctgcaatgggtcccctgaagttgcaaaatatggtgacagagggataggaggtcacagaatctcttcctccttggggccatacaactataaggacaagagcccactgagaggtcaagctgtttgagaactcatcttggggtggggggaagtaacagagagaatcttggccagagaggtatttattcatgccttgccccttctctagagttagctggcaaaaagtacaacaagatacaaattattagggggaccacgaaagggcagagggaaaaattggaggcaggcaggggtgaaggaggctgaaatgacctgatccatatacagaggtctcctggtctggcctattccaaagggagatgatttggagagggtctgcaagacatacggggaagtctgtcaggcaaagctccagaactatgatttctctctgggagctgagccctggggagacatggctggggggcaacctgaggctgctctccttagtgtgcttctggattccaccagtgaacgccgtgctgcagggagagcacaggcgcccttgtgaaagctgaggagcctctcaggaccatggtctaaacacacaatcattccatctgcacgctgtggctgccaccccgggctggagccagaatctcctcagaagatgtatggggtctgctccactaagcccagtgaagaccctcatcagaaaacaaagcttcacaaatttcagtctaaagatttgcattcagagttaaagctcatggcaaagaggttaatccatgagctggaatctttccaggcagcctggggcacagctgtgggctcaggggagctctgagctttgtcataactttctttcagtattgccatcaagttggcactttgagggaaggggaagcccctgccaggtttccgaagggaggcgctgagtgtctgcctctcaggcattctctcctggggctgggccagaggaaactggcttgcagggagcaatgcatcctgcagggaaggagggaggggaactcaaaggcaggctccagccttggtaacagcgtttctcacacctgtgacaagacaggtacagcatctcccgaccacaggctgtcagggcagaattgaacattctggatcacttggtcccacctcctcccatagcaagccaggaccccagagatgttaagtaacctgcccaaggtcacagagctattggagcaaatgcagaatgataactcagggccttagatcctgaagcctgagttctttcccttccaccatgtcttctcctctttccatctctcccagtacctagcacaggcctgtgtgtatggtagatgcttcattcgttaatgtggtttctcctttcctgttccaatattagggtgtctggtgctcctttggctttctctgctttctgtggttcaaaccctcccacttggtctctagagaggctcacagtgtgatcctgcatctcgtttcagtgatgagggtccttctccatctcccagccctcctggcttccctcatcttgcttcaggctgcagcatctaccacaagaggtgagtgtctccctttacgggttttctggggctgctgtcacaaagcacaccaactggatggcctaagacaacagaaatgtattctctcacagtacgggaggatagaagtccaaaatcaaggtgttggcagggctgtgctccctctgaaggctctagggaagaatgcttcctttcttcttccagcttctggtggccctggtatccttggtgttccctggcttgtagctgcaacactccaatctctgcctcagtctttgcgtggcctttttcactgggtgtcctctcctcttctcataaaaccaccatttattggatttagggccgatgctaaggcagtatgacctcattttaattcataacatctacaaagaccctacttccaaataaggtcacattctgaggttccatgcagatgtgaattttgggagggccattatttaacccactacactctccttgttgagaaaacagatcctgtcctccatgctccagaccccaatacaagagggaacagggaatcccaccattactctcatgccatccccttctgtacgtcagggtcctggtgatcagtgggtcctctttgatgaacttgagatagtccacaagaccatctcaccaggaaccagagaaatccccacagtccagtagcccaagccaccctgagtggccacactccctcttcatcccatctctgggcattctagtgagatctcaaagagcaattttgacatcttgttgaagatccaagagtattcttcccattctgtgctttttccccttaaggactcttatgaaactttcctaatcttgatctcctgcctacccagatttgaggggtgggggtaatggccgagaaagagggagacaaaagcagaagacatcgcaaaggagtggtgtctgacaccctacttcctgctccccactccaaccccaagcgcagactaccagaacctctgccatctccgatactgtgagtcaggccaaggtccaagtcaacaaggccttcctggactcccgaaccaggtacgtgagacacacacacacacacacacacacacacacacacacacacacttcccttcacaggcttcctgttcatgacaagcacatctaggccagcccggatgagccaatgaggtgaacaatgataaaacttacccttccatcctcctagccctccaagtacatgacaagtaggagcaatagcccacaattcctaaagtcctcagcctgtacatcacctgaaagaggacatctaatctaaccctagaaggactttcttccacgtggcccaatgtttccttgggccatgcattccagagtcccagaaagcctctcagtaaaagttcttcattcatccagctgatattgactgattcagccaggtccaccagaagccgaatccgagccctgcattcaggtgcaggtgacatattaggggaatgctcacaaggaagctgtgatggggtgaagaagcagaagtgaagggggaggttagacaaataaagtggcttcaagtctatcctcagcctgaccccacagggagacctggagcagaagttgctcctcagagcctgtcccatcttggagcgagggagcagagccctcatctgcccacatcagtcagacatggctgcaggcttgcaggtggctgagaggtgttgtggcacacctgtggaattcccgggcacccccagccaggccactccagtggctcagaagcaggcgcccaacaaggttactggagtgagcctgtagcagatgcacccatggcagcaaggggaagagcccagggcccacagggcaccagtagagtcaactgccctccgatcctgtacaggggcaacgtgggcgccttccctcaggaaacgcacactctagggagagggcagacattgagaaaaaaagtaaccttattctttcctctcgctgtccctttacactggacctgggcttccactcactcctcctcagcccttgaatgaactttcaagccgtcagataacttttttggtgacttagatgataaaacacgctctggacgcttctagtccccagaccaggattatctcaggaattaaagtgtcagcataagaagataaagccagacctgctctattccttcagctcagaactgcttgaggcctctggcgggagaagagagtgcagtctccttctccctctttctggggctcctccttcccagcttgggtttctgctccttgggggttaagctgaaggaggagggaaaaaggggtggtgagtctacatcccctgaacagttcagtcctcaaggggccggaagctctctctctctctctccccttgggtgctttcctggtttcagagagagattctgctgccaactctgtgatctggaaaattctctggccagtggctcccagctctaaccctctctgcctgggagcatcgggcccactccttcacccctccccaccctgtcttggggcaggtcccttttaagcagcctccagaagactagcagcttcgccctactgttgaggcggtgcagattccagattccgcccctctctccgtgctctcaggacactgctcttcaggcaggtgtcaaaccccagccatgactccaggacacacagttaagccctcctcctaagacctttctccctagaattaaactagcaaaggaggagccccatggtgttgggagggacgtgcccagtatttctgcaaatgtctccaaaggaaaattctctctcgctcctcaaattcaatccctttatagcctcaagatgggggacagcataaaagccacaaaaccggtgttcatacacctcctttgcaagtcctgcacaggccaaccagcgccctgctttgaaatgtggaggagcccttccctgctggttagtccttggactcaggggcctcacagagacagaacgagtcacatttaaacattctgttacccaagtacatacacagtgcagtgactcacaatttatgataaggaaaatgaaggaaataaacagggcaagggatgccactctaggcacagggatcagggaagcctgttggagaataggaaggagccacccaggcagagggcatgggggtggcattccaggcactgcaacagcatagggtctgaggcaggaaagaccgtgggtgctcaggaaaaggaaggccagtggaggcaggaggcaaggaggatcacgcataaggtgagagcagagaggtgtgtcgccccagggtaagccattagaacatttgaatcagcggtggcatggtctgatttttatgctaaaaagatcactccagcagccctgtggagaacgaatgggaagaggacagcagtggaagtaagagctgtctagatgggagaggatgatggctaggaccgcggtggagactgtggagatggcaaagaggtccttccaagaccctgcctacccccaacagagcccagccccagggcagagcaggaggtgagtccctggtgaatctgtgttcaggcagaggaagcatgcagagcccagggccgggcgggaaaggaaggaacatctggaaccttggatgggaccttacaggctaagcccagggaggcccagcgcggcctgcctgcctttgttcacggtgtgaggtggggactctaaaataccttgcagcagcccctctgggacccggctgatggagacagtgatgctcacacacgtgagtgtgtgctctgtgcagatgcagctctgggggccctacattcattcctccccaaaatcctaggaagtactgaatcgaactgtagaaaacagctgttttcaaggtcaaaaatgatgaaacaacatggttcaacctaagattaccatcattattttcattataccaataaggaaactgagtacaaagagcttaagtaatttgcctcaagggcacacaactagaaagtggcagtcaggagccaatcccagtcagtctatcccaaagtccatacagaagtctctgatgggaggaaattgtgatttccagttcataaatgaggggaagtcactcagaggtcatataattaaaccaatcctggtggaacccagatccacccctgtgtctgtccagctctaagcccactttaggctagcagtgtccaagataactttctaggatgatgaaatgttctatatctgcactgtccaacacagtcatcactaaccacacctggctattgagcacttgaggtgtgcctagtgctgctgaggaactgaatttttaattttaattttaatgagtttcaatttaaatagccacatgtggttagtggctactgtattggacagtgcagcagctgggttatgaggccatgttgtacacacacccctcccacccctccagcggcccccagcccccttcctacagggtccaggccatgatccccatctccctccactgtaggctgaagaccgccatgagctctgagactcccaccagccgacagctctcagaatacctcaagcatgccaaaggccggacgcgcacagccatccgcaatggacaggtgtgggaggagtctttaaagagactgaggcagaaggcatccttgaccaatgtcacaggtacagaaaacccaccagccctctgtggcaggaaggggtcatctccccacaggagaaagcagaggccacccaaagctgcacttcctgttgagagctatctactcagaggaacactcctgtctctcccttcttagacccgtagacgagactggcagagcaaggaaggtcttagaggacagctagggcaatgctgtttttgcagaggaagaaactgagacctagcaagctcacatggccgactccaagtgaggggacattggtgctctttgtataacaccgtctgtaaggcctctgcccaaaggaagtgctaaagtcaataaacatgggttccttgtcctaagccacagtgtcaccacttcctctagtagaagagacatttaagccacatgtgtcagggggatttacttgggataatgtcacaggagctaagatttccatcgtgttctgggtaagatggagctatcagtaagtgaacttaactgatggcttggtcatggcctcctccatcccctccactctcacccccaaccaaatgccacagcccacagagggtcatgaggaaggggtttggtcctgacaggaggaaaaggctgcaggttctccctgggaaaacatcaagtgaggggggatacctggcccaggagttgggcaaattccaaagctccaaaagaaggaaactgggacaaggtaagaagtaggaagcactttgacctctgaaatacaaaaggttcggagagctgaaatcctgccacctttcagagatggccccccggaagaagcccccatgagccagattccctcacctccctgcccttgcagacgccagggtggatgagggtatgcgttcagaagtgggcatctctctccactctgtgcccacactgaacactctgatgcctaaagcccccctactctgtcactcctcccacaacccttgcccctcactgaaaaattacctgtcccttcccaacctctatcctagctatgtccctgcttgcttggtacttcagatgtgaacgaagctttagaagaaagcagtcttatcacactaactcatactaacatatgcttaacctcccggggtatttccattctaaaagaaagatctgtcaattcaaatgaatctggacctggtataccaggaattactagcaattctggggacattcccagttactctgtgtggccttgggcaagtctcttgaacattgtgttctcattttcttccctgtaaaatgggaataaaatgtattaccttaatgtgctgtcagattaattgagaaaccacttgagaaacgcttacttagaatggaatgcattccaaaacatgcaggttcacctctggtctccatttcctgcctcccacgggtgcctgtgaatggagaaagaactcagtccctttggggtcccttctgtttcagatcccagcctggacttgacttcactgtctctggaggtgggctgtggtgctcctgctcccgtggtgagatgcgacccgtgcagcccttaccgcaccattacgggagactgcaataacaggtggcggggcttggggtgtgggggccgaccattccagccactccgccccgccctgccaaggcctttgtcccttgggcactctaggcagatctgccactgccttgcccacctgggctggcgttcccaccttccccaccttctcaagatcgcgcgtctccagccctctccctccagcccactgtgtgtctctggaagcggcacctttccccggggcgggggagccccgcgccttcagggggtgggcgcagttcagagaccccaaatttgagaggcccccttctctgcgtcccctccgcctcgagcagaggctccttcccccatggggtcctgggctttggagccccggagccggcctgccgaagctcagcgaggatcgtgctggtttcaggaggaagcctgcgctgggcgccgccaacagggctctggcgcgctggctgcccgcggagtacgaggacgggctctccctgcccttcggctggacgccggggaagacgcgcaacggcttccctctcccgctggtgagggcaggccgggccggggtgaaggatgggagccagaggggacgggatgcactacccaaacacgcagtgaaaggaggaggagggatcggtgggggcagcaggggtgcgcgatggagatctgcacagacccccaccttccgctagagggcagcagagctcggagcccggagcccggccacgtggcggtcacgttctggccgccgcaggccagataccctggggtctcccgggcagatggcctccctgccccatcccgctcgcacttaccccagcccccgcccctggagtgcatcagctgttgtttgcctggaggtcctatttgttggccttatcgagctggcagcccctacccagagcccctctcctattcctggacacctggcacctccgtagctcgcatttcagaggcagcctgtctttgttttccctctcttagtggaaagggcaccggcttggcaaatcatcaagtcatacggatctgggttcaatcccatccctgtccctttgtagcggcaggaccttggagaactgacttcacctgtccaggattcaatctccccctctacagaataggctaatgccacccacctcacaaactccttgtagggattaagtgcacttgtaacatggtaggtagttaataagctgtagttgcatctgaatcctcaaagcactttttcctctaatctgccctccccttctctctccatctgtaggcccgggaggtatctaacaagattgttggctatctgaatgaggagggtgttctggaccaaaacaggtccctgctcttcatgcagtggggtcagattgtggatcatgacctggactttgcccctgacaccgagctggggagtagcgagtactccaaagcccagtgtgatgagtactgtatccagggagacaactgcttccccatcatggtacggccctgcagctaggcatctctgactagccccttgcccaccctgatgtagcagacattcccagctcatcagctaggatctctggatagatctgggatactgatttggtagtttcccatgcctcacgtgtccattcgttcactcatccgtttattcagtaaatagacattgaccaccccataccaggcagtgcactaagcgctgaggattccaaagtgaacaggacaccgctcctgctctcaagaacaaagggccagtgtgggaattggacaagtaaactactgatagcagaatgggaacactggagaaggttgtctacattcccgacccagcagcattggtaaaacctgcttattagaaatgtaaaatctcagttgggcgaggcggctcatgcctataatcccagcacttggggaggctg[134 bp omitted]gaggcaggagaaccgcttgaacctgggaggcggaggttgcagtgagccgagatcacgccactgcactccagcctgggcaacagagcaagattccaactcaaaaaagaaaaaagaaaaagaaaaaaaaaatgcaaaatctcaagtctcacccaagatgttaggaaatagattctacatttttaccaagatcaacagagattcattttatacatgataaagtttatactgctgtacatcatcgtggaggatgacttcaactccactcagaaggacttgaaacctggatgaatccgagtgagcagcagggatttgtagggatttccatccggaagggagaggagcttgcagcaatgcatcttttcttattattcatgggtattacagttggagagtcatttcttcactcaaagaataaatcgaggctatgtgctgtggtataaagagcataaactgtggaatgaagccaatgatctgaatcctacatctttcccttccagtgtataagttcttaggcaacttacttaacttttctgagccccagttttctcatctataaaatggaactgaattgtccaccttacagggtttttttgaggactgagatgagttaaagtatgcataattcctggcacatggtaagtccaaaataaatacatggcagctgttgttagtagtaattattaacaaacctgttcccacctcgtgtcctgctttcctgtccagggagctcaatactccctcctcaccagaaatttggagccctcactgtgaggactgaatgattaccctcagttctttcacacaacaggatgtaatgaacttcaggatattatgagcccagggtgtgtaatgtcagcaagaagtgtctggggtcagtgtctggtaccagggtcctaggagggtgccatcagcatctttgcatccagacttgccctggggagaggttgccaggacccagctgttccacccctgcccagtcacttatgcccactctctctgcagttcccacccaatgaccccaaggcggggactcaagggaaatgcatgcctttcttccgagctgggttcgtctgccccactccaccctacaagtccctggcccgagagcagatcaacgctctgacctccttcctggatgccagctttgtgtacagctccgagccaagcctggccagccgcctccgcaacctcagcagccccctgggcctcatggctgtcaaccaggaggtctcagaccatggactaccctacctgccctatgacagcaagaagccaagcccctgtgagttcatcaacaccactgcccgtgtgccctgcttcctggcaggtgagtctagcctgggaacagaagggcccaaggacaaggggattatccagggaagctttaccactgcccccttcttgtcatctttctggaaaaatgcacactgagccattgctgtccctagcagtggtccaggactagcagaagggcccagatgaataaagaattccagaacatatgttcactgtaaaacaaaat[143 bp omitted]aaccccgtctcttctaaaaacacaaaaaattagccgggcgtggtggcacacccctgtagtcccagctactctggaggctgaggtagaagaatcacctgaacccaggaggcggaggttgcagtgagccgagatcacgccactgcactccagcctgggcaacaaagcaagactccatctcaaaaaaaaaaaaaaaaaaaaaaaaaagaaagaaagaaagaaaagaaaagaaaaagaaaattcacacaatcccactacccaccaataatcatcgttaacattttcatgcttattttccagtattttttctatcacagatacagttctacattgttttacataatcgggtcttactataaataatgctccaaaacctgatgtcttcacttaatttactccatgccattaactgttcttctatgacgtgatttttaatggctgcctggtatttcatgacacatattaccatcatttattttctcaatcctacttgggggaatttagttatttcaagttttcctgtgttttgttgctgttgtttaggtaatgaacatcttcattgataaatctttgttctcatttttaatacatttattaagctaatttcccagaagaggaagttctagatgaagaggaatgtatatttttaaagctttttataacctggggacaaaatccccattccattcagcctgtgcacgaccaaagccctgctaattctgttcattccaggtgccctcctggtcctctctgtctccggcttctagaggccatcccaccctcaaacatcctctctctttggacaaaccccctggccaccctgacattgcagaaggccagctcttaggccaagatacctttatagatcttttggattttgtgttcacatatatcccacagcaatccagacacaaaaccgagttctttcttgtttttcataaaaatatgcactcacaccaagaatttacaattttaaatagatttcctggcctggtgcagtggctcatgcctgtaatcccaacactttgggaggcttaggtgggaggattgcttgaggccacaagttcgagaacagcctgggcaacatagcaagacccctgtctctacaaaaaatttaaaaactagcaacacatggtggcacatgcctgtagtcccagctactctggaggctgaaacaggaggatcacttgagcccacgaggttgaggcttcagttagccaagataatgccattgcactccagcctgggcaacagagcaagactgtccagatagatagatagatgatgatagatatatagatatatagatatatagatagatagatagatagatagatagatagatagatagactctcctaaagattagagggcacagggagaagtcctttatccccttatgagacacctggtctttggccatttaactgttcccccatcgttactcctctctccctcccactacagacccccatctccagattattctccctttattacccagaggaactcagccttacccaagctcctcacctcaaacccgcattcctaaaaccttcaaatttgctctgtgaagtaaaaagctcctcattcattcgaagctccccttcctagaaggcggttgggttataattagcaaaatgttactgtgtagtttgtcaccactagcctttgtcacagtgctgtgataggctttattctcattttcataggtaaggagaccgaggctcagaagtgttaagtaacttgtccaaggtcacacagctaaaaagtgtgtatatagaactgagagtcaaacctatgattcagtaccccctccccatccctattcacctgacgggaagtagggcttgttgacggggcggggggggcggggcgcggtcctgtggggcaccatcatttctttgtgcaggttactgggtcctggggctgttagggagaatctaccttcctgccttctgggctttcaggagattctcgagcctcagagcatattctgctggccacatcccacaccctctttctccgcgagcataaccggctggccagagaactaaagagactcaaccctcagtgggatggagagaagctctaccaggaagcccggaaaatcctgggagccttcgtgcaggtagggagtcccaggagcactgtcacctggtcccacctggctcccactcctggctctgccctctgctggctgctgtgcctcaggctctctcctctgttcccacacctccgtttcccccggcccctctgctgcttctctcttgttgtctcattctttgaaatccccttcctttcatttcttcagcttctctgtctcaaaatgaatctctggatttggagtgttggaaagtcacttgtgcgttggtcccttcagtgtgcctgcctgggtgccattactgggactgtaggctccttcactcccgggactgctacatcgcagtgatttgggttattttgatttgattctcttcctttttaattgtctacatctacgcccatctcatgggcatactcagcggatactgttgattggctgatcaactaactagaagagatttacaaaggttgatgtgttgatattaaccatgcacatattttttaaacattttattttgaaataattatagattctaatatattgcaataggaggggggtttcaaaggatgagacaacaggagagaagcagcagagaggccgggggaagcagaggtttgggaacagagaaggtagctggaggcgcagcaccgagcagagggcagagccaggagtgggagccaggcgggccccagtggcagggctcttgggcctccctccctgcagattattagattctaagaattgtacaggaaatttttaaaaatgtacaaggaggtcccatgcacccctcacccagtctcctccttacattagcatgtaagtgctaatgtcttacataaccaagatacactggcaaaaccaggaagttaacaatgatataaaccatagagcttactcagatctcaccagttataaatgcaatcaactgtgtgtgtgtatgtgtctgcatagctctatgcagttttatcacagatgtagcttcaagtactaccacaataaagactcttaaccgtactgtcccctaaaactccctcatgctatctcttcatagccacatccaccctcacccctatatccctaacccctgacaagccctgatcagttctccatctctatgttatttcacagatgttatatacatggaattatgcaacatgtatccgagatgggcttttttcattaagcataatatctttgaggctcatccatgctgttgtgtatataaatatttcattcctttttgttgctgagtagtattccatggtatgaatgaactacaatttgtttaaccattcaacttttgaagggcatttggatagtttccagttttagattattatgaataaagctactacaatcattcaaacataagtttctgcatgaaaagaaatgtttatttgtttgagatacatgcctaagagtgcaattgctaggtcacatggtaagtccatttttaggtgttttttttttttttaattttttaattttgtgggtacatagtaggcgcctatatgtatggggtacattagatggcttgataagggcatacaatgtgaaataagcacatcgtgaagaatgaggtatcctgctgggcacagtggctcatgcctgtaatcccagcactttgggaggctgaggtgagcagatcataaggtcaagagatcgagaccatcccggccaacatggtgaaaccttgtctctactaaaaatacaaaaattagctgggtgtggtggcatgcgcctgtagtcccagctactcgggaggatgaggcaggagaatcgcttgaacccaggaggtggaggtaggaggcggaggttgcagtgagccaggatcacaccactgcactccagcctgggcaacagagtgagactccctttcaaaaaaaaaaaaaaaaagaatgaggtatccatcctctcaagcatttatacattgagttgcaaacaatccagttacactcttaagttatttgaaaatgcacaattaagttaaattattattaactatagtcaccctgttgtgctatcaaatagtaggtcttactctttttttttttttttttttttttttgagatagagtcttgctctgttgcccaggcttcctcagcctcctgagtagctggggtttcaggcacctgccaccacgtcctgctgatttttgtatttttagtagagatagggtttcaccgtgttggccaggctggtctcaaactcctgaccttaagcggtccacccaccttggcctcccaaaatgctgagattacagacatgagccaccgcgcctggccatcattctattttttggtacccaccaaccatctccacctccgccccccacagcccctcattacccttccagggatctggtaaccatctttctactttctatgtccatgagttcaattgttttgatatttaaatcccacaaataagtgagaacatgccatgtttgtctttctctgcctggcatatttcacgtaacataatgatttccacttccatccatgttgttacaattgactagatttcattcttttttatggctgaatagtacaccattgtgtatatgtatcacattttctttatccattcatctgttgatggacacaagttgctttcaaatcttagctattgtaaacagtgctgtaacaaatgtaagagtgcggatatctctttgatatactgattttatttcttttgggtatacacccagtagtgagattgctggatcatatggcagctcaatttttagttttctgaggaatctccaaactgttctccatagtggttgtactaatttacattcctgccaacagtgccaaatgtgttctccacattcttgccagcatttgttattgcctgtcttttttatataagttattttaactggggtgacataatatctcattgtagttttgatctgcatttctctgatgatcaatgatgttgagcaccttttcatatgcctgtttgccatttgtatgtcttcttttgagaaatgtctattcaaatcttttgcctatcttttgattggattattagatttttttcctatagagttgtttaagcttcatatatattctggttgttaatcccttgtcagaagggtagtttgcaaaattaatattttctcccattccgtgggttatctcttcactttgttgattgtatcctttgttgtgcagaagctttttaatttgatgtgatcccatttgtccatttttgctttggtggcctatgcttgtgggatagtgctcaagacatttttgcccagaccaatgtcctggagattttccccaatgttttcttgcagtagtttcacagtttgaggtcttagatttgtctttaatccattttgatttgatttttatatatgggtaaaagataggggtctagttttattctccggcatatggatatccagttttcccagcaccatttattgaagagactgtcttttccccagtatatgttcttggcatctttgttgaaaacgagttaactgtagatgtgtggatttgtttctgggttctctattctgttacattggtctttgtgtctgtttctatgccagtaccatgctgtttggttgctatagctctgtactataacttgaagtcaggtaatgtgattcttctggttttgttctttttgcttaggataactttggctactctgagtcttctacttttagttttaaaaggaactgccaaactattttttagaatggctgtaccatttacattcctatcagcaatgtatgcatgatccaatttcttagcatcctgacggtgtcaccaccattttttgttttatcctttctgataggtgtgtagtaatagctcattgttttaatttgcatttctctaatggctggtaatgttgaacatcttttcctgtgctcatttgccacttgtgcatcctcttcaataaaatacttgttcatatattttgcctattttcaaattggactatttgacttgtaatgttgagttttgagagttctttacgtattctagacacaagtcctttgtcagatatgtgatttgcagtgattttctcccagtctataatttggtgggggttttttttttcatcctcttaagaaggtcttttgtagagcaaaagcttttaattttaatgaagttcttttaatcaaattttcctttcctggattgtgcatgtgatgtcaagtctcagaacttttttcctagtcctaggtcccaaagactttctcctgctttttccttctagaagttttatagttttatgttttacatttaagtctatgatccattttgggtaaatttttgcataaagtgtgaggtttaggtcaagatgcttttttaaattttttctggctatggatgtcaaattgctccagcaccacttattgaaaggctattgtttctccattgaattgcttttgtttctttggtaaaaaatatttgggcatatttacatggatctatttctgggttgtctattctcttccattggtttgtatgtatgtctattcctctcataccacagtgctcaattactatagctatacagtaagccttaaaacactttattcttctttttcaaaattgttttggatattctaggatctttccctttccatacatattattaaataagtttgtgtatgtctatcaaaaaaccttatggaaattttgatagaaattgcattaaaattatatatacatttagggagagttgacatctttacaatgttgagttttccaatccataaactaagtatgtctccccaatctttagattttttatttctttaatcaacattttgtagttttatcacacagattctgtacatgttttgttagatttatacctcagtatttaattttcattttgttttgttttgttttgagacggagtcttgctctgtcaccaggctggagtgcagtggcacgatctcggctcactgcaacctcccgggttcaagtgattctcctgcctcagtctcctgagtagctgggattacaggcgcccgccaccatgcccggctaatttctgtattttagtagagacagagtttcaccatgttggccagaatggtctcaatctcttgacctcgtgatccgcccacctcagcctcctgaagtgctgggattacaggcgtgagccaccatgcccagcccagtatttcattttctttggaggaattataaatggtattacagctttattgcagtttctacttattttatcagtgtatgaaaatataattgatttttttatgtgttgattttgtatcctgtgaccttgctaaattcaattagttctaggcattctgctgtagattacttggattttctaaacaggtaatcatgtaatatgccaataaagacagttgtgtttcttcttttctaatccatatgatttttctttctttttcttgccttattacgtggcaattcctggaacttcctagtggctcaaacttccaatactatattaaatgcgcatggtaagaaagcaggcatccttgtcttcccaatcgagaaagtattcaatctttcaccattaagtataagattagttataaatgttttgtagttgccctttatgaggttgaggaagttctgcttcattcctagtgtaatgagagtttttatcatgaacaggtgtagaactttgtcaaacggtttttctgcatcaattgataggatcatatgatttttatcctttaaactatactgcttgctttggatttattttgctcttatttttcaagtttcttgaagtagaaacttagatgactgatttgcaatcttttctattttctaatgtatttagtactataaatttccctcttagcactgagttgactgcctcccacaaattttgatatattgtgtttttattttcattcagtaggtattttttaagtttcctttcggacttcatctttaacctatgtataatttagaagagtgttatttaatttccaagcgtttgtagattttcctgttgccttcctgatttctagtttgattccatcatgatcagaaactatactctgtatgatttcaattttaaatttgttaagatttgttttataaccctgctgtggactatcttgttgaatattctgtgagttcctaaaaagaatgtgtattctgctgttgttgaatgcaatgttctgtaaatgtcagttggatctgttggttgatggtgctattcagtctgtactccagctaattttctgtctagtaattctcccacttactgagagtcaggtgttgaaatccctagctataaatgagaatttgcctatttcttcttccagtcctgtcaggttttgcttcatgtattttaaagctttaaagttctgttgtttgatccatatcatttaggattgcttcatcttcttgatggatagatccttttatcattatgtaatttccacttttgtcctctgaagtcaactttatctgatattaatatagtcacccctgcttttaaaaatttatgtctgcatgatctttcttattccatcaatttcaacctacctatgtcattatgtttgaagcgagtttcttttagacatcatatagttgggtcacttaaaaaaaaaaaggaaaagaaatatactctgccaatctctgacctttagtaattagtacttttaaattatctttaaaataattattaacatgttagggattaaatctcccatatctctcattttattacttgttttctgtttgttccttctgtttcttcttcctctaatattgtttttcttgccttcctgtgggttaattgaacattttttagaggtccatttgatcacatattgctttgtataattttcttagtggttgttctccggatagataggtagatagatatagaaataaagatagagagagagatagagatatggatttacaacgtatcacaacctattggtgtcagtgctttatcatttcaagtgacatgtagaaaactcatttccatttggtcccttcaccttccccacttttgaaatataattgtctgaagcatttcttctatatatgttttatagcacatcagatggtgcttcaaccataaaatataatgaaaaaattcatgaggtggaaaagaattgatgtttacttctatttttacccattacattgttcttctttcctttctgaaggtcctgtccttcttctattaccattcttcatgtttagagagtttcctttagccattgtttaaggataggtctgtgtgcagcaaattctctgagtcttcctttgtgtgagaatgtctttatttctcctttattcctgaagaatcgttccaccagctattggattcagggttggtagttcttgtctttcggcacatgaaaaatgtggcgacacttcccctggcttctgtggtttcagatgagagcttcaccgatattttgtttgtttgtttatttctttgtttctttgagacagagtcttgctctgttgcccaggctggagtgcagtggcaacatctcgactcacggcaacctccgcctcccgggctcaagcgattctcttgcctcagcctcccgagtagctgggattaccgatgctcaccaccacacctggataattctttttgtatttttagtagagacaggatttcaccatgttggccaggctagtctcaaactcctgacctcagatgatccacccgcctcagcctcccaaagtgctgggattgcaggcgtgagccaccacacccagccctttaccattacttgaattggtgtttctttataggtaatgtgtcatttctctttgactattttaatactttatgtttagttttcagaaatttaattatgatatgccttggagtgaatttcgctgtttatcctgtttgggattcattcatcttcttgaatctgtaaatgtgtgcctctcaccaattttgagaaattttcaggcattatttattcaaatcctttttcagtttcaccccctttctcctctgtttctggaactccattgatatgaatgccagatcttttgttatggtctcacagaacccagaggctctggtttgtttgagcaatttttaaagtctattttctttctgttgttcagattgagtaaattctattgatctgtctccaattctatcctctgtcactcccactctgttattgagtctattcaagcttttttaaaatttcagctagtgtattttcagttctgtaattttgatttgtttcttttttataatttctacttctttgctatgatactgtatttgtttcaggagaatctgtaattgattattgaagcatttttataatggctgcttttaaaatttttatcagataattatagcatctgattcatgtcatccttggcatcagttgattgtctgtttactcaaaacgtggcatttctggctcttggtattatgagtgattttcagttgtatcttagacattttggttgctatattaggagacccttgatcctatttaaattttctattttaggccaggcacagtggctcacgcctgtaattccagcaatttgggaggccgaggcgggtggatcacctgaggtcgggagttcaagaccagcttggctaacatggtgaaaccccatctctactaaaaatagaaaaactagccgggcttggtggcatgcacctgtggtctcagctacttgggggtgctgaggcaagaggatcacttaaatcagggaggtcaaggctacagtgagccaagatggcatcactgcattccagcctgggtgacaaagtgagaccctgtcaaaaaaaaaaagcacttcattttagcacatagttaccttgtttaggtttagcatgtaggttctggactacttttgtgggctttaggtccaccaaagcttagtttcctgagccttgcaatgctattctggtctacttcactcttctggtgtttgggggcttcccactcaatccctgctggtgctgtctgcaaggcaggaaagtacttccctggctgcctgctgttgctgagcaaccttctaggggaacaggaaccactgcacctgagctccttatggcactgggttaagagcaaagagacacagagcctcactgtgaaagctagatagaaatgtggaaaatgtgaagcaaaaaagcagaatgcacaggtatgcattctgtaggattataactatgtaaaagtcggtaacatatagacaaagactacaagaataaaaattaatataattattaggttatgtggaggcatttttcttttctgaaaattttttatttgtgttagttcattgtgtttttatgtaaaagaaaaccagaaaccagtctttccattcttctgtatttctttcagaactggagattggatgaactttcctcagttgcccctgaatcattcctgtggtttatcattcctcttgccctgacattgttacattaaagtgacacacaaagactgtcactttagcatcaaggtcataaacttagcacaaagatgacaaagatagtacgtttcatatgccaaattcaaatgactgattagtagagcctatgttgagacaaatcgtaagagatcagcagaaaaaaatgtcatgattgattagcaatgtctgctatgctcataggaatgggaactgggcacatatgctatccatttgccatccttggttttcaacagctcatcactcttggctgcagctctttcacagcctccctctgcagaggtttaaaccttcttacaccctttcctcttgattttattctccctccagattatcacctttagggactacctacccattttgctaggtgaccacatgcagaagtggatacccccatatcaaggctacagtgaatctgtggatcccagaatttccaatgtcttcaccttcgccttccgctttggccacttggaggtcccctctagtatgttccgcctggatgagaattatcagccatgggggccagaaccagaactccccctccacaccctcttcttcaacacttggaggatggtcaaagatggtatgccctttcagggaagtgctgtcacctgggtctcccactccgcagcctattgtagggaaacttgggttggaagtcagattccaagcacttttacatgaccttgggcaaatgaattcacctcactgagcctcagtttcctcatttataaaatggggacaataatagtacccatctcacgaggctatccaaaacattaaatgagatatacatgtggagcaccctacaatggttcctgacacacaggaggtgatcaataaatataagctattctttctttcctcttggcttctaagatgactgggatttccctacctcctttccccgccctaggcttctctgacttctacagggtttggtaaataaattgctcttttctgatctcttctagagtttttcacttcatagaggtgccagaggttggacccaactttcctttatccctaggctatgttgtgttgaaattaactttacttaaagcctagcaagtcaaggacatttccttgagatttatgcaacctcttcccattatgcaacgttcctcagcaga[132 bp omitted]ctgcggccttgacctcctgggctcacatgatcctcctacctcagcctcccttgtagctgggattacaaggcacacacccccatacctggctaatttttttgcctttttttcagaggcggggttttgccatgttgtccaggctggtcccaaactcctgggctcaagcagtcttcccaccttggcctcccaaagtgttaggattacaggcatgagccaccatgcatggccaaaaaatatctcaatgtttatattcatgccatcatcccatgactgcccctttctgcccacccccagagcagacaatctggatgcccctgtctccctgagcacacccttcaggctgcactgtgctcttctctccctccttccagcctgggatgtccaggtgacccacattcaactaagagaaaatgtctggtggaggcagaggcaagccatgaatgatgttcccactcttcccccaacctaagcatggcttctgggtctcccttggcaggtggaattgatcctctggtgcggggcctgctggccaagaaatccaagctgatgaaacagaataaaatgatgactggagagctgcgcaacaagcttttccagccaactcacaggatccatggctttgacctggctgccatcaacacacagcgttgccgggaccatgggcaacctggtgagtgtctgaagtctggcctgcactggggaaattttagctaactttctagggctcctggagactctcttctataaccctgaggatctgatcatctgatcaattctgaaacaaaagtcaggccagttttttttgtttgaggttttttttttgagacagggtcttgctctgttgcccaggctagagtacagcggtgcgatcacagctcacagcagcctcaaactcctagcttcaagtaatcctcctgcttaagcctaccaagtaggtgggactacaggtgtgccacatgcccagcttatttttttttttaaatatagacatagtcttgctatgttgcccaggctggtctcgaactcctgggctcaagcaatctcccaccttggcctcccaaagcactggcattacaggtgcaagccaccatgtccagccccaggccattcttaaaacccactttgttcatctatgaaacagaatgtcccatttcccctaatgcagagaaaagagcatatatctggtactatcttggcattccttaaatgaaaaagaggtcaccaactaactttaaaaacagtttaaaagccctgaaaacattaagaaaacaatagagagaaaccaatgactgttggacctttcttttgtccccatgaaaggcaatttaattaagaaccagactgcctgagttcaaatcccgcctatgccatttactagttataagactttgggcaaattacttaacatttctattcttcatttacttatttgcacagtgcttagaatagtgcctggactcatagtacataccacataactttcatgattgcttagtggttacataggacttaaccaactagcccccttaagattgaagtgcagataaaaaacaatggattccctccttccccatcccaaaggctgtaagcccagactttctagggctgatagagctggagtggacatggccccaaaggaggctgtgaacaggaagtccccgggatgagacagcctcagtctctccaccctagggtacaattcctggagagccttctgtgacctctcacagccgcagacactagaggagttgaacacagtgctgaagagcaagatgctggccaagaagttactgggtctctacgggacccctgacaacatcgacatctggataggggccattgctgagccgctggtggaaaggggtcgggtggggcctctcctggcctgcctcttgggcaagcagttccagcagatccgtgatggagacaggcaagtgcgtcctcagccagggagggaagggcagggcccttctccaagaggggtgtcccaaggtcctgcgtgagcgctgactccggatctcagtgtgagtagggcttttcatggtccctgtgaccctttccttcccctgtgacagagtggggaggggccagcggccagactgtggagtgactctacttctgtctctgcaggttctggtgggaaaaccctggggtcttcacgaacgagcagaaggactctctacagaaaatgtccttctcacgccttgtctgtgacaacacccgcatcaccaaggtcccacgggacccattctgggccaacagctacccctatgacttcgtggattgctcagccatcgacaagctggacctgtcaccctgggcctcagtgaagaattaggggcccgcgctgcacaggaaagttccctttggtccacagggccatttcaagcaagttcaatgacctggtcccttagagctccatatcccagtcccagcccttctttgcagctgggcctctctatacccctggatgaacagcttgctcaggccccagggtggctgcctcggccctcccagctcttacactcagctccagtggcttctcctttctgtcaagacttagccccgctgagatgcccttctgctccagcttgctggatgttacctgtcctcttccctccacaagtcttggcccttaacctttatctttcttcctgtcctctcacctagattgtaagctccctgggccaggacttcagcctgcctccgagggtcccctgtggcacctagcatggtgcacagcacattagaagtgctcaaaaacatctgatgactgactaaagatgctaggcgtgacaccgttccctccaaaagcagacctcggaatcactgccaaataagtaactagacgtttacaggccatacatgtcttaccactgagatggcgcgtgcgtgggtcttgaggtggaaggggatggtttggtgggatttctaagagttctcagagaaaggggaggggcagggggctcctggggaaaacaagcactggccgtggagtagcaagagagaggacacgggggggacggtaggcggtggtgccaagggataaaacaggaagggaaaccaagcctgggtctcccgcagctgaagctaataccccttccagtggcccttctgagaaataccctcttctagagtggtccttagatcctgtgatgcctctgaaggggcacttccagaacattccttgagtttctgcccaatacatattcatatgttcttcttttaaaatgaccccctgggaaagattagcccaaccagggcctccagatcccccaactggtggggtgggagtgggagacacccagtcatcctgtgggaagagcccaggagccagatgacctcggctgcagcctggcactgccacccacttctttaaggcctcagacgagtcgcttcacccctctgagcagccctctcctcatcacagaaatgaggacaagcagtatttttgctgcttcttaccatggtgaggtcctaacgttaccaggggccccatgagtacattagaccccaccgtcctacaccacttccagccccctccccatatttgagaaggaagaggagagggagggagtccaccagtcagacgcagggttcaagctccaggcaagactactagggaaatacactccttcccctccctcagtgctggccctgtcctctgggcccagccatctgctctcccttctccaggagccatgtgcaacatgaatgagaaggagtccactgtcttgagggcctctgaacccctgtgccaggctgctgggatgcaggatgcagaggcccctcttgttggggaagggcctgcctcctcaccaggtctctgtactttctctcctaccacacagcattttgtcccctccacttcctagcccctggcacaggcctgacacagagtgaacacatagcaaacgtttgctagagcaatgaacaaacatgagggcttggtgaccacagttccctgcagggtggcaggggtggaaggtgagggaggagggtctgcaccgcatgccccggcccccaggcttccaagagatggctgccctccacgtacggatctcaaaggaaaactccccaacatcctcaccctcggttcagaaacacagggccctgagcacagaccacactggttcaagctcagagcccagagtaagcctctgcaaaagcgccagttcctcctcagacacagacagagtggaggtccccatcagcggtgcctttattatcataaacattgggagcaaataaatggtacagaaagggcaacaggcccagttcctcttcaggagaacttcagtgaataagcaagaaatcagggtgaggaagaaaaaggggagccatggcctgagcctggctggctgggcccataagtcaaccacacagcccagctgcagctggcttatccctccaaggcaccactggtccagctctgctaaccaggacacagatggcatcttggtatctctttcttgcctctatatgcttctcacgcctagtacagtgccttgcatgtagtaggtgctcaataaatgaagaaccagaggatacaagtgggccctccaagaaaccatgacagatgtaatttacaaggaagaaaactcttgtttaaggagggtaatttgctcaaggtcacatagctagcaagccacagagccaggattggaacccaggcagtctagttcctgagctgtgctcctcaccagtccgctctgctgccttccacatactcagtattctcatcagcacaaacacacactcacataaatggcacatacacataacccatgaaacactccccatgttcagacaacacacacgcatgaaaagccaatttatatacttcgcacatacatgagcacacaaatgaacgtctagtcactcattttctcagctgcacccagaacagggctgggctcatctagggcaaggagatctccgtggttccaactggccagcccagatatacccctcactgctgcacccccttacctggcctctaggaggcttccctccaggaagccaggttcaatgcaggaagtgtactgcagttgacaaagtcccggggatatgagttggacatgaagatgttgttcttagacacggtggtgatgcctgtgttgtcgcagatgatccggggcaatgagatctgggccagggcctgtcgctgctgcatgctgaacacaccctcgttctcccaccaaaacctgcatggggaacacccatggacactgtgcccaaggatattctgggctggcagggcatcgatgggcttgtgctgctcccaggatataacaaagccacaacaaatgccacctggaagcacaggagggccccaggcccttgggcagcccaggggctttcacacaagtgatgctccactcatcgtgcagagtaaagcacagctgcccagtggcctttcccttacccctagcccggcggcctccagggcaccatgctggagggggacccgggcccacacacactcctgaagccctgtgccctggccaggagctgcatccacaggagtggaagagaatcttgggggtggtttataattcgcccacccagagaggggcacctttttctaattttcccaaaggtgcagtacaggctaagcaagaactagacatgaagacatcaggaccacgaggaaatgacactaaggggagctgtgggaaagctgggaggggactgcccactggtgactgacacccacatggtggcacagtgaaacccatgggaagaagtagctaagggtggcacttttctatcttccaccctttacaaccaggggtccaggtctttccttgctgcacccccaacaggttcagggcacattaggggcactccagggcatctggaggattcctggaacacactggaaaattactgactccctccagtccttcaactgacaggaggaaatttgggctccaagagagtcaaggatgggcccacagccacccagcggcccacgacgcctgcccctcctcaccgatcaccatcccggagcttcctgaactgggtaccgatgatgcaggcgaggagtgggcccacgcggcctttgcgcttcagaggctcggacacgccgcccatccagatgtcgatgttgttgggcgtgccatactgctccatcagtttcctcgccaatttcaggttcctcagcaccgtgcccagctggcccacagtttcaggctgcgggagcccacagaagcgcctccaggcattgtatcctgcatgggggaggggacaggtggctatgggcaggtctctctgcttcaaggtggggaggtcactggagacagcagggaagattcacatatcgccagcagcccagaaaacccaccttcccaacacaaccaaggtcatagagggagggaaggacctcacctcaaggaaccctgtacctttggcttagaccaaggggcacaactgggcctctctgggaccctctctgtctttctcttgccctcctaccataaggcaaaccctaaactgccacagttcctgctgggtccaagaatagggacatctccttgtccccctccagagcagcccgatgtgtctgtctctgacccatgagaggtgaaatgtgtctagaagcctcagccacatgggctaccccataacataggcacaggctttgaggttaggctaatctggcttcaaatttcagctttgccactgacttggctagagaacctggccaggttctgaatctcatcaagcctcagtttcctcatcagtaaaatgaaggcaataataatctcttcccccagagttaacgtacaatgaagcaaaatggaatgatgacagagacagattttcagactgtgggttatcattatgatgacgatgcccctaatatgagaattacagcatgcaaaggaggttgagaggagctggaaatttatcaggtgggtccgggaaaaggcaggggcctggcctcaggctacttcctgagagcaaagtgcctctaatatgctttggagagggcagggaccctagagtgggaaggggggtgatgggctacctaggaggcagctcaggggaggtgagcatcaggggagactcctgcagcccctcacctgggaggccgtggtccctgctgcgctgcatgttcagagcaggcaggtccagcccaatcctcatgacctgctcaaacaatcgctcccggatctcatccactgcaatttggttctgacgattcagcttggcaggggtggccatgaggccccggaggatggggtcaatgccacctggggaccagaggagccaggtcaggggaagtatctggctcagtatcagagctcagattggagtcagggacaagtccaggtagggtcaggaggattcgagaagagggctgggcacaagcagtgcctggtgccaaggtggtggccccagtgagcaggtcctcaccggtcactacatgaccccagggacatataggtctcaggagattatgccattcagacttgcaagattgggatgctcccaggccctggcttcctgggtcacagcgagccacaacacataggaagtagccagttccctctgagggccatccccaccccactgtttattatcagatatggaagcagagtcagaggaactgaggctagagagtcagaccagatctccaagatgggaggaaagcagactgctccccaccctagctccctagagccaaggtgatccctaccccacctttagctgtcagcccactcgctcctggcctaggtcctgcttaccttccagcacgaccctccaggaggcaaaaaagaccctgctgagggggacacgggggttgggttccatgggctggtaccgattgtccaggcggaacatgaagggttggatgagggtgtggccgtagcggaaggcattggtgaagacgttggcgatgcgtgggtccactgagtcattgtaggaacggtacgtgggcaggtacttcctcatggccgttggccccagcaccaggggcaggtagtcccggtaagtgatgatctaaagacaagtcatttggaatggcctctccacccactcctccacagcaaatgccgcctggcagcacaggagggccagagtctctgcctgctcttggcttcggggaccccttccatccctctatggtcagggaatagcctcccacaataccggacctgggcctaacagagtggcactgagaggcataaatagagttctactgcttgctggctgggtgaccttggaccaattattaacctctctgagcctgagttcctcaaatgtacattaaggataattatattgccctctgccttagaggactaaatagcaaatcacttttttagtcattgtgataacttccttgtcctcaagttattaatgtctcatttctgcaactatcttataaagtccttgagagcaagggaaattgaagttgttgaaattcttcacagtgcccaccaagtgcctgcccacagtaaggctcagtttaggtttgtggaaagcagggaggcaggaaggaacgaagggccattctggcatgattttccctgtgaaaagtgaagacatggaatagtctcactctacattctagagtctagaagttattttggagtgtaaatgaatttcacttgagttcttagtgcaaatcaaaaactcacccttagcaccgaaaactctctcctccagaatctaggagtgtgtgtgtgtgtgtgtgtgtgtgtgtgtgtgtgtgagtgtgtgtatgtctgcctctgcctctgagggagagggtgggggcaatgaagcaccagatgttgagagacagaaccaggaacattgccccaggggtaaatgaggctaaggacattgggtggattatgacagagccaaaaagaagaggtgagtgggctgaacacagtgactcgtgcctgtaatcccagggatttgggaggtcgaggagggcggattacttgagcccaggagtttgagaccacactgggtaacgtggcgaaaccccgtctctacaaaaaatacaaaaattagccgggcgtggtggcccgtgcttgaaatcccagctactcagaaggctgagatgggagaatggcttgagcctgaaaggtggaggttgcagtgagccaagatcgcaccactgcactccagcctgggcaacagggtaagaccctgtatcaaaaaataaaaataaaataataataataatttttaaattttattttatttatttatttattttgagatggagtctcgctctgtcacccaggctggagtgcagcagcgccatctcagctcactgcaagctctgcctcccaggttcacgccattctcctgcctcagcctcccaagtagctgggactacaggtgcccgccaccacgcccggctaatttttgtatttttagtagagatggggtttcaccgtgttagccagcatggtcttgatctcctgacctcgtgatccacccgcctccgcctcccaaagtgctgggattacaggcatgagccaccgcgcccagccctataatttttttaattttaaaaagaagaggtgagtgggtaaaggagctaagagtgacagtgagatggagggaagaagaatttactgaacagctacttgggcgctaaaccaaacattcaaccctcccaacaccaataacagacccacaggaaagaagactgcagggagcaaacctgcgaagaaggagagggaagggaaggaggctttgtcaagcacttactatctgaaaggtgttttcatatatgtattataatccttacagcctcatggatgaagaaggcaaggctcaggagcgttaggaacttgcccaaggtcacacagctaggatgttgcagggacacatctggatcccgtgtgcccggtgttcaagacggcctacctggaccatggcccccacgatcttccgggcttcctggtagagcctctccccatcccacctagggttcaggctcttgagctctgtggccagccggttgtgctcccgaagtaagagggtgtgcatggaggtgagctcgggcatctcactggaacgggtgtccccttggggaggcaaaagccactgtcattcttaaggcctccatcccagaaaagatttgctccactgaaaccccctccccagccaaggcctgaaatgcctcctactcacccctcctccccatccatcttttcaaactatccccaatttacactcctctaggaggccttccctgatgccccagtccacaatgatagcttctgcctcagctcagggccgctgctggttggggatgctcattcaataggtatcacttccaacacatgacatgccactttcctgtacctgaaactgggagctccttgagcacaggaccaaggcttgtgcctttttatattttaccctccctcctagcacacatatggatacatggggcttaacagagtgcctggtacaaagtatgagacttatgaacactgcttggttcattgattctcttgattccaaggagtgtctgggaagaagcatgcgtgttggcacagcctacatccatgcccatgtctgatgcagctaacgatcacagcactctttcctgctaaaattggatgcaacctcagaatccttctcaacacaggactccagaaagccactaccatttgaacagagttgtcagccctgccctttactacatgccaatggtgcagcctgccccaggggagagggctaggacatgagatatgtggagtccacacctgagactgttcaagaaaactaagcagatcccccctggttcccctagtcctcccagaacccttctctgcaggggccagagggctagggtcaggacactagggtcagtccttgccagctctagaagctggtggaaaggaaattctctgagagcagcatctccatccatgaacagctagaggtcataatgacccaggcttgggacatggggctcatcaaagccaggctgtgggcagctgagtctggctaaggagggctgcccttgcctaactagcccagaagaggtcgggcatctcttgcagaaagtccgacctggatcctcctcccagggtcccagccagggagagaccagcaggaaccatcaggaggaggcagagggaggccagaggaaagggcctgaggtccactattgggtttacatttaaaaacactggaaaatggctgcgtgcggtggctcacacctgtaatcccagcactttgggaggttaaggtgggcagatcatgaggtcaggagtttgagaccagcctggccaacatggtaaaacaccatctctactaaaaatacaaaaaattagccaagtgtggtggcaggcgcctgtagtcccagctactcaggaggctgaggcagaagaatcacttaaacccagttggcagaggttgcagtgagccgagactgtgccactgtactcaagcctgggtgacagagtgagattccgtcttagaaaaaaaaaaaacactggaaaatgtctggtcatggctgccatcactgccccaattgtgtctccaaaactgccaattgtttacatttaaaatcccatcatctcttattatgggtaattaagatgcgcaggaggggatattttggagcagtgtggtccaactcaaccttccgagatgatgaaaatattttacatctgtgccacccaatagggggagccactagactgtaaggcaattgagcatttgaaatgtggttagcaccgctgagaaactgggtttatttaatttaaaataactaaaattaaaatagccacatgcagctagtggctaccacattggatagtgtcgctctagagggtgagggcaccacagcgttctctgtcctttagttccctgcccctgagggatttgactctcttgtcttccagagtccagaagggaaaaaagggacagagaaagcaatggactgatggacagaggctcctcagccatgcctgggtctccatcttagggttggagaggttgtttgcttttctgcttttctggctccatctgacttgttaccaaggcaactggattaatatcatgaagttgatagtaatggctggtgaggacagtctctctaagtacaaacccacaagctgctcacaaacagactcactgtggctccaacagggaacatctcctatgccacctctggtccccaccccaaagctgacctgccaggaagcaggggatgcgcgctgagcggttggtgaggagacaggggtcatcgtgcaggttgtcaaagggcagcagggcccggccgttgtcttggaagcgctggttgacggccagcagccccagctggttggacatgttgcgcaggttcctggccaggggctcctcgctgccgtacaccatgctggcgtccacgaaggaagtgagcgcgttgatctggttgcggatggtgatgttgctcccggggcaagccgggcaggagcggaagaacgggatgcagtcggcttggttcttgatgcgggggtcattgggcgggatctgaggcacagagagaggctagactggctcaccgagggcaaggaaggtgcccaggcagaactggatctccccctgccctcaggacctctggtaccctcaacctgcagagaggcctccggaggcccgaaagggatcgctgcctagggcgccatcagcaacagcctctgaggtgcagggttaatgagcagaacactgaactgggaacctgggcaacccctgggtctgggcaccgccaggcctcggatccctcctcactaaagcgtcgcccgtctctctccccttctctctgctgtgcctgctctccctctggccctgacattctcctgtctgtctctccctctctcaggcgctctctcctttctctcctcctccttccctactcagcagtgcctcgaccaccctgcccactcccagccctgtcccacggcacccaccagacccccaggctctctctttctgtgtgatgggggttggggctgccctctcagtggggcggaaacaggactgagcatggaggcttggggggcactgagaaggtctcctcccagaaccctctcccaacctaacaaagagccagtgattccaccaacaggactcctgtcagccaaggaggaacaaccctctctcccttggcctgccagaggcagtgagcaaatggacggccctggctgccagctggctgagcccaggcgcaggaaggagacaggtcatagctgagcagccagtgctgtggacacaagggaggcagggccagccttcctcagcgtctgggaaaggaaacctgggcacagaagggagatggccccttccagaaacaatctcccctctcccaacccaggcagtgggcgggaagcagggccaccttgagcgggaagcagggcggctgctgaacgcagctggtctcgcagttgacgccagtgacgaaggaggcccgggcggccggctcaggggtgaagtcgaggtcgtggtccaacagctggccccattgcatgaacatgagtgagcgctcctggtccggagtcagctgatcagtggggaagcgcacgatctcgttggagaccgcgcgagcctgcgggacacggagatcagctggcgcctgggtccgcgcaccgcgtggccgggcctcgccccctctgcccgccggcgctcaccagagccaccgggaagccgttgcgcttgaccccgggcgtccagccgtagggaagagagaagccgtcctcatactccgccggcagccagcgcacaaaggcacggttggaggcccccagcgtggggctgcgtctgcaggggaggacagggcgctgacaccgggaggcttgtggcgtccgggacgcctctctgagcccggttcctgcagccacccccagccagccgcacctgttgttgcacatcccggtgatggtgcggtatttgtcctgctccgggcaagtcacccccacgtcctggtaggcgcagccgcttgacttggacaacacattcagctgggcgggcgtcagcacatctgccgggggaaagaacaatgggggagctgagccgcctcacttcctatcccaggcaacctgaggctgaggagccctggagactcctgagactccctggaggaagaagttgaggggatcactgagagacggctggggtccctaggaggagtcactagtggagcagggacctggggtgtgatgggcaacagtaccagtgacattgaatggccttcgccacagggaccgcagcttcctctccagcaggtctagagccacgtgcaggtagtcagcggccctcaccgccgtcctggtggctgccaccggctgcttgaagtaggataggagttccatggggctggctgagccgctgcgaagccgctgcttgatgctgcttggagaaaggaggagtgagggccagagaagggatacagacccacccagcagagccccagcccaggggcagacatgcaggaccatgcaggcaggcccacgggtgggaggaaggcttccttttataaaaaggatatggacctgggtgtccagacagaggcaaggctttgggaaggatggcttttaagctgttctcccatccagaaacacagggacagacagacagaaagggagtccacatgggtccccatagtccccctctcccaccttcaagctccctgctgcctgctgcttctctgaaaggcctgggacatccttgcccagagctgggcagtgcctcgtgccccacctttcccgccgctccttgtaggccttgtccaccagctgcttggcctcctccatggagctcagcaccaacgaggtgtccacctcccccaggacagctgcccagagcagggatcacaaagtcaggaatgggccccaaccccctatcaggccccagagctaggaaggcctgctctgagaaaaggggtctctggaacacaaccaccccaacacaccatcttctcccaccttgggaactgttacctggagcagcaccttcagagggctggggcgtggccagaatggccaggagccctgctagggccagaagcagcttcatctctgcagtgagacccccagcccagcaaggtcctaagtccaccatgcatctgagagaagagaagaagggaacccccatctctcttctcctgggctgctcaatccccctttgtacctcagccccacctcagagggccctgtctatggataaagccagacctccttgagggaggggctcactgctctcttatccccttgccagctgctgtcatccagcttccaaggaccccacctccacagctcacctgatattgtcagctcctcttagctcaatctgcgcttttatgtcctctaagctgggggtggggtgaggtagaggaaggtctgatcctggagactgaactctttctcctcccccactggggttggaaggtacacacagaggggcccctgaaatggggggaaggggcaggaaaggaggggccagcattgtccccagccttttttttttttttttttgagacgttatcttgctctgttgcccaggctgatgtgcaatggttcaagcgattcttctgcctcagcctcccgagtagctgggattacaggtgcccgccaccacgccctagcctctagccacatcatcaattatttccttaggcaagaagtaatttttgtatttttccttaggcaagaagctaatttttgtatttttagtagatacagggtttcaccatgttggccaggctggtcttgaactcctgacctcaagtgatccacccgcctcagcctcccaaagtgctgggattacaggcatgagccactggccccagcctgtccccagcctttgaatttagcactaccagcccaagatttctcagctcaccattgtgtgcctataccagtgcttgtccccaggggatacacacaactaacccctctgaaattctggttacactggttatccagggttcctttgaaaggaacaaaagtcaggaactggtagcccaaggaattgcagggaatagagtgcccccagggaagacaggaggatgaaagggagacctggagtaaagatgacccaattggcctcaggtggccatcccccactccaacagtaacctgcatccaacagccacccaatgggcagcctctggttcttggtggggctaaggggacaggaaatctggctggagaccgttgggcttcacaggaaggaggaccctggggactgtgggcgcaggaccaagataacttcctctatccctcctcactcccctttcttcttggcttctggtagagggctgtctccaaactcctcctccccaccaccatctgctcctggatttcaggaaccaggagagagcagaactggttgtggttagtgatcagttaggtgatgcagcccagggcctctctgggacaggatcagtgcagttgggaggacttgggttaatgattcagaataattctgaaacagaagaggatatttcttgcttgagaaagcccagcaaaagggccaccaatctcagcaggaaaagtactacgacttttgactgaatcagtctacctctctgggccctggtcaggctgagctcgtgccaaccatgcctcccatgtcccatttaggttccccctcctaccttcagccaccttcccgccacccactctttttttttttttttttttttgagacagggtctctcactgttggcggagctggagtacagtggtgcaatctcggctcactgcaacctctgcctcctgggttcaagcaattctcctgcctcagcctcccaagtagctgggattacaggcgcccgccaccatgcccggctaatattttgtatttttagtagagatggggtttcaacatgttggccaggctggtctcaaactcctgacctcctcctgatccacccactgttgggattacaggcgtgagccaccgcgcccggcccactcttgtcttctatgcccagaccacctcttggccaagggacaagggacagcaacacccagaatatcttcccagtgtgtccagggattctgtcccctgctgagaaggggaaccaagcttttgccctgccagtgacttgctgtgtgtgaagttggtcgagtggctctttgtgaatcaagctctagaattttagaggcttttggaaatgatttttcaatcctttaagtaatataattttcactgatgaaaagtttgagaacacgagtatgcaaaaataaaaataaatcaaaattactcatcatcaagtgagattgtgggtacttttttctttcaaggtttatcattgtcttcacataaataaacaataggaaggaaaataattgcccataatcccaccactcaccaatacctcatttaagaatttgatatcctatatgtaaacataatatatatttttaaatattgataagaagaactttaaatattgttttaccatctactttcggtacttaacaattttagtctgagcatctccctgtgtcaataaatacaggtttacttcatttttatgtctgtataatatttcatataactattttatatgatttattaactaattctatctcattagatacttagagttgtttctgattttcattattataagtagtactaggataagcatccatggagttaaatctctcgccacatcgtcaattatttccttaggcaagaagtaaaattcctgcgtatttgggtatgcgtgttttagggctttttaatattgatagtcaaatggcctgctgaagattttacctcatcctcccatcagccatgcatgagagcacctgtcccctgtcacccttgtcaaccttgagtatgcttgagtgtcctttcgctcttttaagggaattgtcaaggctcaacaggggagagatatttaatgcaagccccttattgtagagctgagaaagaaggagcccagggaaggaaacgacttgaccaaggtcagcagtgtgacacagttcagaataatctccatgcccagtctcctgacttccaaaccagtgctctttacccagtagcctctggacacctgttcctgacctttcattcaatgatttcttcaacaagtatttactgagcccttgtcattcaatgattccttcaacaagtatttactgagcccttgtcaggtgctgcgctgggcattgagcattctccactgagcaaagcatgagccttatcctcaaggagctcacagaggggagcagaaaggcaaacaaatggcacccccagaaccaatgcagggaccttagggagcagcgaagagcagcacttggatcaactgggggaggtcagtgaaggctttcttgaggaattgattctggagactgtcttgaagaatgtctcaaagctgaccaagtagacacagaggaagagcattctgggcccagagaatgacactgtcggcttcactcagttccaacacagggagagggtggacagggtgaggctggtgggccaagcagaggcccaggatgcaacattctcgcagacctactgagaaattattgtcccgaagccccagggagtcatgaggtctgtgaagcggaagtgcatggtccaagttactttggagagctcacctgctctggttgcagtgtggacagtgcgctggaaaggcaggcccagacacagagacctggcaggcagcatgtcagcgattcacctgttaagaggcttgctctgcttcctcacaggcagcaatcaggccaggagtgtttgaaaatacttctccaagaacgacgtttaaactccctgagtgctccacccacatagaggtgagagcactcccaagatgtggattccccaaagcccctgtctttggcccgggggtgggtctggggatgcacatgtgtgtgccagggctagagatgttctatgacttgacatgttttcaaccaattaataatgacccacctgaggttatcccaaggtggtcagcctctcctgtctgcacctctgtcgttccctcatctaggccctatttgtcgggccaggtgtgtttgaggctcaaagctcttctcagcatgcagagtaaccaggggaatgcagctcaagggagtgggagggatttcaaataagctttgtcccatgtgagttacccgccagtccccttcctgggggtaggctctggagggcactgctgggactgctacatctcaagactatagtcatttgagagagctccccgcctccaacacactcacaccccactgccgtctcttctgcccacttagagttcccaaatatccccacccccagggtgaagcccagctgctggtgggataacgggccctctctgctactgcttgcaaaacagcatgttgtttcttaatgctgtttaagaaataattcagttgggatttcagcctgatttcctgtgtgtggttggagagaaagaggcacccccagaaggctatggaagctggggagatggcagaggcagcggctgcttagacaaaccagttttactcagcccatagatcttgttttatctctctttacaactgttttaattaattttgaattctataggtaatacctggatatatttggaaaaaaatttaaaattacagaccaagctaaagctccttttagattaggttattgcatcatcctcagttccagtccccttcctccactcttcagatgcaaacactgttgacatttttgtatttgaccttccaaatcttttagtaatactttacattcattcatatttatggatctgtgagaaatattctgttccctggtttttctccataaatgatattccattatacatattgttctgcaatgtgtttcttttactcagtgcatctttagatctatcatgtatcacttagagcgtgatctcacctttttttttttttttttaagttttttggtttttggtattttttagagacagggcctcactctgctgcccaggctggagtgcagtggcacactgcagcctggaactcttggactcaagccatcctcctgactcagcctcctgagtagtatcacacttttttaacttacatgatattccttagttggcctgtctctccattttgtgaccattcctctattaatggaagctgacattttaacattgtttttcactattaaaaacaatccctcagccaggcacggtggctcatgcctgtaatcccaacgctttgggaggccaagacgggcaaatcgcctgaggtcaggagttggagaccagcctggccaacatggtgaaacccagtctctactaaaaataaaaaaattagccaggcatggtggtgggcacctgtaatcccagctacttgggaggctgagacaggagaatcgcttgaacccaggaggcggaggttgcagtgagctgagatcacaccactgccactgcactccagcctgggcaacaaagagcgaaactccatctcaaaaaaaaaaaacaaaccaaacaaacaaacaaacaaaaaaaaaaacaatgccttgagaggccttgttgtacatacacacaagtgttccccatggtaaaaatgaagaagtggaccacaggttttgttcatttacaatttttaaggccagatgcagtggctcatgcctgtaaccccagcactttgggaggccaaggcgggcagatcacctgaggtcaggagttcaagaccagcctggccaacatggtgaaaccccgtctctacaaaaaatacaaaaattagccgggcatgatggtgcatgcctgtagttccagctactcatggggctgaggtgggaaaatcatttgaatctgggaggtagaggctgcagtgagctgagattgcatgattgcactccagcctgggtgacagagcgagactctgtctcaaaaaaaaataaaaataaaaacactgggcgctgtggctcacttctataatcccagcactttgggaggcttaggtgggcagatcacctgaggtcaggagttcgagaccagcctggccaacatgatgaaaccccatctctactaaaaatacaaaaattagccaggtgtggtggtgcacacctgtactcccagcttccttgggaggttgaggcacgagaatcgcttgaactcgggaggcagaggttgcagtgagctaagatggcaccactgcactccagcttgggtgatagtgtgagactccatctcaaaaaaaaaaaaaaaaaaaaaatttaagtcctggcacagtagctcacacctataatcccaacattttgggaagccgaggtgggaggatcacttgagccgaggagtttgggatcaacctgagcaacataatgagactctgtctctacaaaaaaaaaaaaaaaaaaaaaaaaattagctgggcgcggtgatactcctgtagtcccaacgacttgggaggttgaggcaggaggatcacttcagcccaggaattcagggttacagtgagctatgatcacaccagaacactccagcctgggcgacagagcaagaccccgtatctaataaaatcttaacagatacgtattgctaaactagcctccaaactttgtaaaaatctcatgagcaaagaatggaatcatattattggttcaacttttatgtatttggttaatagtgaggttgagcatatttttatttgaattatatcttctgcaactttcctgtgttttgttttgttaatttttctatggtgttgtcactctttttattgatttgtaacaagtattctatattctgggtaagcactaaagtccttcagttgttatgtaggttccaaatttctttttagtacatcgcttttcatttatgttttttatagtgtcttaatttcaaggtggtcaaatttatcaatttttttatatggattttgctttttgttttatgtatttattttggatttcgctctttcagcttttttttttaaggggctcttcctttcttcaagattataaacatattttcctgtatatccttataatactttaacactttgtttttacacttaggtctcaaatccatctggaattttgtttgtgtgaatggtatgaggtggggagccatctttttctttttttttttcccaaacagataatcagttgtcccaatgcctttaactgaataatctgtcatgtctccactgaattcagatactagttttgtcacttaccataaatgtgtgtgtatttctgattgttctacgctaccttcctagtagtctatctattcctatgtcaatacctaatcattacagtcactataactttctaatatgttttcattactggcgagataaattatccttcctcattctttttaaaaatagtcttcagcattttagcatatttactcttgcttaagaatttccgaacgtttgtctagttccataaaaaatcctgttgagatttttaatgatattgcattcaatttatacataaatttggtaacgattgatatctgtatgatattgtcttcctatcccagtacattcattcattcactcaacatatatgtactgagcacctaccatgcgccagcactgttctgggtcctggggatacagcagttaaccaattacttgctctcatggagtttacattcttgagtaattcaatgtatcattccatttgttttcttttgtatctttcctttaaatgttattgttttacccatatagggcttgcttgtttcttgttaggtttgttcctaagcacttcctttttgaaaaatgtaaatttggtcattaagtttctctacggaacttgcaacatcttacaaatttttttttaacctcaaaaacattcaaagtaagcttttttctttgctttcttttttctttttctttttcttttttttttatgagacggagtctcgctttgtcacccaggctggagtgcagtggcgctatgtcggctcactgcaagctccgcctcccgggctcatgccattctcctgcct[212 bp omitted]ctttgttgcccaggctggaggtacagtggctattcacaggcacagccattgcacactacaaccttaaactcctcagctcaagcaatcttcctgcttcagcctcctgagtagctgagactacaggtgtgtgcactgttcccagctaaggtaagtattcttaaagaaaacgaaatgtaatgggattctattctttcagttttctatagaaggtagattcatttatctgaaaagcactatacctttctaaccgacctttctagaaaggttagagtctctatctgatgaagatacaatggtttgtttgtttgtttttagacggagtttccctctgtcacctaggctggagtacaatggcatgatctcagctcactgcaacctccacctcccgggttcaagcaattctcctgcctcagcctcccaagtagctgggattacaagcatgtgccaccatgccatgctaatttttgtatttttagtagaggcagggtttcaccctgttggtcaggctggtctcaaactcctgagcttataatccacccgcctcagcctcccaaactgctgggattacaggcgtaagccactgcgcctggccaagatataatttttttaaagagtgaattttcggccaggcatggtggctcacacctgtaatcccagcactttgggaggctgagacaggctgatcacaagatcaggagtttgagaccagcctggccaacatggcgaaaccccttctctactaaaaaatacaaaaattagcctggcatggtggtgcgcacctgtaatcccagctactcgggaggctgaggcaggagaattgcttgaacccaggaggcagaggttgcattgggctgagattgcgccactgcacttcagcctgggcgacagagcaagactgtgtctcaaaaaaaaagagtgaattttcaaaattttttggttttaaatttggttttcaaatatgtttaggtcagtactgtaaaagttaagacaagttaaattctgtgattttacaaatgcttaatggttttgcagttactccaccctttatacttgtggttatttggggagggggtaagcttccacgagtcaaagttctacaaaagacactaaaaataagaaacattaaactcaaagaacaagaattaaacagcatcttcaccaataagattagttaaaatagaaaagactgataaacccagtgccagtcaggatgtgaaaaaaaataagcgtagcttggccccatgccatgggatggcaatctgacaatgtcagtcaaactccaaagtgctctgactcagcaattctaccttcaggtaggaatttatctttcagacacattcttaggaaagcataaagatacctacacaagtgtgttcatttccgcctcatttgcaacaaccaaaagactggaagcaagccaaatgtccatcagaaaagttttgccaggttgtggtataccctggtaaatgtgttttatgcagcctttaaaacagagggagatctatttgtagcaaaatggcaagattcaacctgagaaaactgattgggaaaaaaaaaacaaagaaaaagaacaaaatggcaagaaatgttaccaaaagaaaataactagttacaaaacattatatatagcatgttgcaattcatacaaaacacacagacatacatacacgcataggcaccacacacatgcacacagaagtgtttacatacacataaagattctgagagcaggcacaaaagcctatttacagtggttacatctggggaatgagctgaaggggctgaggaacaagacccttttgcttcatcctcagtgctcttctcaaagttttacaaggaaaatataataattttatcatgaaagaactaaaaatctctccctcaccacaattatgcaaagtagcaaactttggttttacttaatcagtaggtttggattacttttacactggcttgctaatatgaagccagacactaacaaagattgaaatggtagcattgggccagcgcggtggctcactcctgtaatcccagcactttgggaggccaaggcaggtggatcacttgaggtcaggagttcgagaccagcctggccaatatgacaaacctccgtctttttttttttttgagacacagtttcgctcttgttgcccgtactggagtgcaatcgtgcgatctcggctcaccacaacctcctcctcccagattcaagtggttctcctgcctcagcctcccgagtagctgggattacaggtacacagcaccatgcccggctaatttttctgtatttttagtagagatggggtttctc[131 bp omitted]ccaggcatgctggcacacacttgtaatcccagctactcaggaggttgaggcatgagaattgcttgaatctggaaggcagaggttgcggtgagccgatattgaaccactgcactccagcctgggtgaaagagtaagactctgtctcaaaaaaccgaaaccaaaaacaaacaaacaaacaaaaacattctttgcaaactaagaagaaaaggaacttcctcaagtctgacaaaggatatttacaaacaaagatatcactagcgtgatacttaatggtgaaagactgaatgcattctccctaagactgggaatgaggcaaggatgtctgcttctgccgtttctattcagcattgtattggagagtctgtgctgtacaatgagacaagaaaaggaaattaaagggatcagaatttgaattgtctttacttatatacaatatgatcacatatatacacacacacacacagatacacacacatatatatatatgattctaaggaatctacgtaaaatctagtagaatcggtaagtgagtttaggaaggttgcaatatagagggccaaaatacaaaaattagctgtgtttctatatactagcaacaaacaatcagaaattgaaataaaaataacaataccactttcaattaagcatcgaaaatatgaaacacttacggataaatctgacaaaagatatacaagattgatactgaaaacaacaaaacattgctaagagaaattaaaggagacctaaataaatggaaggatatagtttttgataggtaaacagactctatactgtgaaaatgtcaattcttcccaaattgatctataattcaatgcaatcacaatcaagatattaataagaagctccagttctaggtaagatggaataaacacattccacactgtctgtctctctcacaatgaatgcagctataaattttgtacagaatgcatggagcaactatatgaagactctgaaagtaaatcaatgcaggcagactgaagaagaataatatatttgaatataccacccaagtagcagtgagtttactgtattttttcctctggtatcccccaacctgaactcaatgcagcccaaaacccaatatgggcatctatggggcagagggggctccaggagaaaactctctggatccgacttaaggtgcaggaaagagatctcctaatgttcagagagtacagagacctcccacttttctcttttccttttctccattatcttgcaccccagttccaagcaatccttggaaatagtggcagcagcaggagaaggggccagaaagaccccagaactctgagggagggcaaacttcctctccagtcagaggagctgtgctcccaggaaggtggaatgaatccttgatactctttcttctctctctctgtcttcccattgccctgccccggtgcaggcatggtcacaggaagtacatcacagaacaaggtaaataagctttttggccaaaggatcaagaatctcaaggaatcataatgcatcagggagatgacagaaaaggaggagctcaggaaagcaaccctttaaagaacctgtgggacaataccaaaaggtctaacatttgcatcatccaagtcccagtaggagagggagaaaaatgtggtatagaaaaatatttgaagaaaacttcaaatttggcaaactccccaaatttggcaaagacatagacctatagaatcaagaagctcagcaaaccccaaatagaataaacataaataaacataaaagaacccatattgaacacgcagtcaaactgctgaaaacaaaggacaaagacaagaatcttgcaagaaaccaaagaaagatacattactacagagaatcaacaatttgcaggactgtggctttcttatcagagattatgagacagcaggaagggaaacaatatttttaaagtgtttaaataaagaactttcaacccataattctctatccaatgaaaatatccttcaagaatgaaggtgaaataaagacattctcagttaaagaaaaactaagataattcactgtcaccatttctctgaaatgacaccagaaagaaacttgggacatcagaaataaagaaagagcaacaaaaatgttgaatatctgggttaaatataatagactatttctctcctttgagtttcttaaaacctattttctggttgaaagcaaaagttataatgctgcctaatgaaatttttcatgtatgtagagacacaaggcaactggggagaaagattaaggaaaatatatcgtggtaaaatctctaaatcccacttaaagtgctaaaatattgatttaagtaatgaaaagtcaaatgtatatgctatcatacctaaagcaaccactaaaaaagttatatatataagtatatatacacataatgtgtgtaaatgtatatataaatgcaataacatttaaaagaataccaaaaattgttcaaacaacccagaagaaagcaagaaagagaaaacagagggaataagcagaaaacaaataatataattgtaaaccaaaatataaataatcacactgaatctaagtgaacggtcttaacacatcagttaaaacacagattgccagaatgatttttttttttttagatagggtctcactctgtcacccacgctggagtgcagtggtgcaatctcagctcactgcaacctccgcctcccaggctcaagcaattctcctgcctcagcctcccgagtagctgggattacaggcacacgccactgccacccggctaatttttgtattttcagtagaggcggtgtttcaccacgctgaccaggctggtcttgaactcccgacctcaaatagtctgtccacctcagcttcccaaagtgctgggattacaggcatgagccaccatgctcagcccagaattttttaaatgactcaactgtatattgtctaaaagaagcccacttcaaatataatgatataagtaggttaaaggcaaaaggatagaaaaagatataccatgctaacataaatcaaaagagagctagagtggctatgttagtatcaaacaaaaatacttcaaagtaaagaaaataactaatgataaagcaggaaagagttaattctctaagaagacataacaattctagatttataagtgtttaacaacagggctttgaaaaacaaagcaaaactgataaaattaaaaggaaaaatgaataaattcacaattgtagttggaggcttttacactcctctctcagtaattagtagaaccaagggtgattccatttgctttcctctgatgctgcaaacatggactcacgcaatcctcccacctcagcttcctgagtagctggaactatagatgaacaccactaagcccagctaatttatttatttatttatgtttgtagagataggggtctcaccatgttgcccaggctggtctcaaactcctggcgtcaagcaatcctcccaccttggcctcccaaagtactgggattccaggcatgagccaccatgcctggcccaatttcttttacaggctatgaaagaggaagcaacaccaatcggatgaattataagaagaatcagaatctcggtcatgcaaagacagacccagtttccccagtgattcctgtcagctacaacattttgaagtatattaacattaagccctgaatatgcttcttattttaaatactgtggcatagtgcaattcattagcctttttgaaaggcatagaaaggatttgaagtcaagcatgtcttaaagaagcaaagagactgatagtcaataccaatcacccagacccagaagtggggcaacaagcacggagcacaggcttagtatcaacctgattgtgtctaatgcattctgctgacacctctgcaactgagcgttagcatccatactgttccaattctccatacggcatcttctacagaaacagatctctaagagaagaaatgaaaaagtttcatccaatcttcaaaaatagttaatgtcaagtaaggacattactgttacattataatatcgcatcccaaagtcagcctagtgaaacgaatgcttaatttcttctcctccttcttatttgtagtgtcaacagatcaaaaggcaaatgtactctaaatctaaatatttaaaattattcacctctttttactgcttattatccctcataaataataactcactaactaggacgtggaactttcactcagaaagaaaagcttagttatagcaataaaaatattcttataatacaaactaaaataaaaaaacctaatattcctttgtctgctctattggtaagcaatagaatcaaattaaaattagaatcaaatattttaggaatgtcagtgaccttagagatggtttagctaaacaatctcacttcaagactggaaagatgaggttcgagcattgtaagaaacttgtcaaggtaacacagaatactaccggcaaaaagtggctgcagaactctggctgcctattcaccagttttgtgtccctttgtttattaaatgctgtcttttcacagtgttatgaaggtaaaaggctagcacaccagcctctctggcttgtaagtaagtaatgaatgggggatataaagtagtctaacccattgtgcattgaaagtagatagaaacctcttgtgaacacctgggcagtagaataactgaaataaacaatttttctagttgctacagcagaagcaagaaagaatgaaattgactttatttatctacttaaagagtgaagacagaaactgcaataagaattctggcatcactgttcaaccaagagctaacttttatattgttttagaaaatgtagtcattggccgtgcgcggtggctcaagtctgtaatcccagcactttgggaggctgaggcgggcagatcagaaggtcaggagttcgagaccagcctggccaatatagtgaaaccctgtctctactaaaaatacaaaaattagccaggagtggtggcacatgcctgtagtcccagctactcaggaggctgaggcaggagaattgcttgaacccaggaggcggaggttgcaatgagccgaggttgcgccactgcactccagcctgggcaacagagtgagactctgtctcaaaaaaaaaaaaagaaagtgtagtgactattttattgtcgatgattttacctcatatgacattcctgacattgtgattaataaataaaagttgtgctgccagaaaagaaaaaagaactaatggagagaaaatcagcaaagatatagaactgaataacaccatcaaccaaatggaaacaatttgtatgtatacaaaatgctacctaataatagcggaataaacattatttccaagcgcacatggaacactcataaaaataggccacattctgggccataaagcaagcctcaacaaatttaagagaattaaaatcatacaaagtgcgttctttaagcataatgggatcaaactagaaaacgataagagaaagataacaggaaaacatccaaacacttggaaactaagaaaacacacttctaaacccatgagtca[131 bp omitted]taaaaccctgtctctactaaaaatacaaaaattggccaggtgtggtggtgcatgcttgtaatcccagccacttgggaggctgaggcaggagaatcacttgaactcaggaagcggaggttgcggtgagcagagattgcatcactgcactgcagcctgggtgacagagtgagaatctgtctcaaaaaataaataaataaataaatagaacagaatgagaattgaaacacagtatatcaaaatttgtggaatgcagctaaaacaatgcatagagggaaatttatagcattaaatgcttatattagaaaagaaagaaatgtctcaaatcaatgatctaagcttatgctttgttaaacaagaaaaagaagactacagtaaacaaagcaagcagaaggataaaataataaaggctagaaattaattaaataataaaataaacgtcagaaattaatgaaatttaacacagaaaaataatagagaaaaaaatgaatccaagaaggtgattctttgaaagatcaattttattgataaacctctagttaaactgaccaagaaaaaaagaagacaacttacaaacatcagtaataaaagagggaacattaccacagaccccacatacattatgaatataaatgtgacaactaggataaaaaattccttgaaacaaattacaaaagctcactcaagaagaaatagttatatttaagtcctgtatctgttagtgacattaaattcatggtttaaaagcctcacacaaagaaaactctagccctagatgctttcactggcaaattttatcaaacatttaaggaagatataatgtgggctgggtgcggtggttcacgcctataatcccagcactttgggaggccgaggtgggcagatcacctgaggttgggagttccgagaccagcctggtcaacatggtgaaaccctgtctctactaaaaatacaaaaattagccgggtgtggtggcacatgcctataatcaaagctactcaagagactgtggcaggagaatcgcttaaacctgggaggtggaggttgcagtgagccaagaccgcaccattgcactccagcctgggcgacagagcaaaactccgtctcaaaaaaaaaaaaaaaaaaaaaagggagatataatgctagttctacacaatctcttccatgatatagaatgtcatagaaactttccacctcattttatgaggctaactgtattctgatattaaaacctgacatggacattacaataaaagaatactacagaacaagataactcatgaaaacacatgcaaaattcctcaacaaaagagtagcaaattgaattcagcaatataaaaaaatcataacaaatggggtttatcctgggagtacaaatctatttcaacttttgaaaaatcaatttaattcagcttatcaacagcgtaaagaaaaaaaagacatttgatcatcttaatagatgcagaacaaacatttgacaaaatttaacatccagttttgataaaacctctctgcaatctaggaaaaaacaaaaggaactttctctgcctgacaaagggcatctataaaaacaaaacagaaaaactcaatgaaaatcattcttaatggtgaacaattgaatgccttccccctaagattaggaacaaagcaaggatatctgttttcaccacttctagtcaacattgtacaggaggtcctggccagtgcaataggcaaggaaaaaaattaatgtcatacaaattgtaaaggaagaaataaaactgtctccattcccagataacaaattgctttaaaaattccaaagaataaccgagaaaaaagctactagaactaataagtgagtttagcaaggttgcaggatacaaaatcagtatacaaaactcaatcgtatttcttcatcctagattttttctttgcaggacagttctccaggtagccttagaccaacccagttcttcccctttgttgtttgtagttatcaagaatgactgtaaaatttgctgggaatacaacatcctgagatagggaggaactgaccagaacagcctgggctctcttccagtcccccaacagaagacagatgtccttcaaggctttatcccagagagtcctgatgctcctgaggtataaaacccagagtaggctgtcttccagggtcccacagctgcagtgcaaatggggtacatgcagataagattccacccaatttccttatttttcttatctgctatatatttagaaactatgaaaggatgctttcacttatcaaatgatttttcaacatcttgaagtgagcatgtgatttttctcctttgatctgttaaagtagtgaattctattaacatagaataatagaattaatcaatttaataataaaatggtgaaacacttttgccttattaagataaatgctacaggccaggtacagtggctcatgtctgtaatcccaacagtttagaaggccaaggcaagagaatcacttgaggccaggagttcaagaccagcctgggtaacatagcaagactccatctcttaaaaattgtttttaaattagttgggcatggtggcatgtgcctatactcccagctactcaggaggctgaggtgagaagatcatttgtgcccaggaagtcaaggctgcagtgagctgtgatcatgccactgtactcctgcctaggtgacagagcgagaccctgtctcaaaaaaaaaaaaaaaacaaaattaaaaatgctacagccatgatgtatatttaatttcctaaagctatatttaggatattctgtgttcataaaccagatagatctgtcataatgttttcttgtcctgttctagattgggtgacaagattattcaagtctcaaacattgaattggattgcttctctttttttttctgtacttgtaatctatttatcagcttcacatgcagtgagtcctttgaatctaagtatctgtgtctttcttcagtcctagaaaatttatagccattatttgttctatcactcatggtctctatttctccccacatcttcccaaccccagggtattcttatgaataggtattgaaacatttgaccccatcctccatgtataacttttctttcattttgctcatctcttttatccctttgtacagcactctgagggaattacttacctcaaaattcaagcttactaattgtatccaactatgaattatatgctcttcacgcatatattgagtccttttttaacaagaatatatgtattttttgcaagatctctattaggatcactttcataactacttgatcttgtttcccatatgtaattccttcctttatttctccaacaataactgtagactttttaaagttttctcctaatgctttactgacttatgtatatttttccatttccatttgttatctctcttagtgaagttggctttcctcaaatattttttgagtctttactctgttcttgccattgtggttgggagtctttgctggacggctgggtgggaactgctgccatgattctgagggttttggttgagagggaagggtcacagtatgctgcggtttggtggcttctcacctgggcggtgatacatcttgtttctgccaggtgcggccagccacctaaagtaccacctggtctctgatccaagctgcaacccttactgttctctaagtctgtcatctaaaggcagacatcttcacctttgcccttggcccatggcagaaggagaatgtgcaacaatcattcaaagaaaaaccccaactaaccacaccatcggtagcccctagggtctcttctgccctgtttgcactgcctctagtccagaggcaacgtgcagagctctcccacatataccctactctcaagtttctcagtatgatctgccatctgttcttgtcttttccagaatcctgttgtttttagtctactgagagtcccctttcttgctttcaaatggaactgtgtatagtgtttatttgttctatttctctcatgtctattatttctgtgcatttggtatagaggagaaagactgcagtgtgtgttcagtccaccatcttgaaactggtgctttccctctgtgtgtttcccgtctgtcccatcttcctccacaaccccagccccagtagcaaatatctgaccctgtgaccacgggctcaggaagctaccaaaccaccttcttaggaaaaggattcaaaagctcgtggtgttgattggtttttgcccctgttagccttaggatgtaacttctggggtctgaagtccagagtccaaagcccagctgccccacccctccaaggagtcctttgcccatggagagtccagcatagattttgtgaaaatagactttattataataaaatgtctttttaaacaaattcccccaccattccacacccctggagaccaaggtcaaggtgggggttcagtcaaactatctcccaccacagcaaaggaaacatgcaaagacacactcacccctcagagggtgggggatggagtggatcgggtaacggcggagaacccctaccccactctgaacagggaatgtatgaaaatagctgcataaatctgtccttttctccagcccctggactccaacaggggttagaagaaaactatgcaaaagaacttgaatccaatgagcaaaataaggcaaacccaactccgctttcggccccgctggccccagggtctttgggggcgggaccttacaggggccagcaggccccggcagggaaggatggagcacgacgggggcagggtggggcccactttggcttggcctttctccttcctgggcctgtgcagtggaagcgaggtggaggaagctgaactgaggcactgagtatatacatatatacaggctccgcccgcctgcccgctggggagatggggctccaataaaatccagtgcaaactttccttcaggggagggaagacaggatcaggacagccagagccatcagggggcacaggctcctttctccctccagggcccgtcctgggactgggaagggtggcagaagggactagcgcagcactgtgggacactagtagacgaggtgggtggaccaggacgcgagggtcctgggtccagtcctggctcagtgaccttggtcaagttacatactcactgtgggctcagtttcccctcctgtaggaggaaggtgcttctctagagagttcatccttaaggagccatttagctctgaccttcaccaaggctctttgattccctctgaatgccacagtgttaacgcagaagaacgggggctctgggcccagtctgagccttccctgctcagcagagacagtgatctgggggcctctcagggcctcttctgcctgcaggatgggccacagcttcactccttcttcccagagcccagcctcctgaggagctgcttccccttggagaagaaaccccacaccttctcgcttctgccctggggctccccacgttcaatcctgggggcgctgccagagctgggggtacaaggcccacctgggggccctggggacccttgtgtggtgcagccccagtcctgaaatgtgagacagaaggagcaaggtcagggcctgattccctcctgaccccctgacccattttttccacagcctaaggggcctgcagcctcccatgtcacagaaccatggctgacgctgagaaccagggcctcacctcccaccactgtcagaaacacacagcacaggtggtgaatggggagggtgatgccgagggagcactaagctgggagtcccaggggatgcagtctcggttctggatcgctcacctgtgaccctgggcaggccccttcccttctccctccagggtgcagggctgacagggcccaagagttcttggaacctgcccctcaggatgggtgcccccaacttctcacatgtcacctccctccaaaaacatggagcgcaaggacaaggactgcttagaagcagctgtcactgcccaggaaggtagcttctacagcccctcatagacagaaagagcgtctccccaaacccagcagatgtggcccccccaggccttcagggtgtggagccagtacccactccatggggaggaagattgggactctcccttaagggcccctaagaggactgccgggaggccaaggacccagagggactcacagctgggggcatcactcagcccccaccacaggctctggaggctctagcatctttttccttactgaatctcctcctgactccactccctttgcctcaagcccgcccagacggcgctccttagtgatctaaggccagggagctgggagaacagagaagccaccagaaagccccctacacctatgttcccaccttcacctctggtacctgcacagctctgtcagctcttgccagcctgcatgtcttcccttcctcaaactcccacttgctgcccggagcctggcaggctcccagccagaaccaactatagagcccaggccagaggcaaggaaagtgggtgcacaaccgaggccccacccccgccccaggcctgcagtgatgtggcagggctgcccacagaggccaaagcatctacccccaaccagccagagccaatagccggctggcgagccccaggcccttcccactccctcttagggctccttccacaacatccaggagggagaggttgttagggaaacaaaaggagggtgtttctgagccccagagaataatggtttggggttatttatggatttgaactactcaaacttcccttttatttttttatttttgagacagagtcttgctctgtcacccaggctggagtgcagtggcgtgatcaccgctcactgcagcctcgacctcctgggctcaagtgactcccacctcagcctcccaagtagctagtattaaaggcatgagccaccacacctggccaaacctccccttttatcccccaagtagagaaaactgagagttggaggtaaatcatgcatctgatcaccctaacaggtcacaatgcagaggacaagggtgggaagcctattattactggtggcattacagtgtcaccctggcaccagtaataattatgatattataataccatagccacacagtatcataataccactgatgagtcctaatatggatgtcacgtcatgttctataaaccacatgtgttatagaataggaagcatcagctaatatgggacatcacacactaagatgacatgtaatcctatgacagctggcactgccctgggtaaaggcaaggcaaggggagcagggagggggagggatgactcttcatgcaaatctggctcatggcaagctctccttcgccattccctggactacagtgggaaagctgggtcagctccagtatttgagacaaaggagcactgtctgattatggtcaagtgggggtggacggtcacacaggggggcagtcccccacttacatgttgctctctctacatatatctatctccatctagcactggactcttctcctcctcgttctctgaggacagggaacaaagagaggagatgggttaccgacagacccgcaccttctccgcccggccaccaggtggccctgcgcaggggtgggccctactctccaaggcctttgtgttcacacatggaagccctgagttttctggctggggcttggcctcttcaccctctctccctgccctctgagagtggaggcttagttgtattccactcaccccaaggagaggcaagctcaaggaacgagaacccaggaagctgggcctggctgggcaactggcttccaaaggcacctgggaggtatggagaccacccccagggtgggagtgtcctgaaacagggactttgattggccacaggtgtgaggcagaggggtccttttccacagggccccctcacctgcgtcagccaccaggtgttggcagctggcgagatggcctgagggtcagggtcacagctatcatccctctgcagagaggggcacatactggggggcagctgcttggtggggctcccctctggtggtcaattagcggctgcacgctggacacagtgcttacctgcatgaccaccccagctgcacccctgccgcaacactgccctggccctaccaccccaccagtagggtagactgccctgccaagctgggagcccagctcctcactgacctgactctcagcctggggtgtcctgggttccctgtccaggccgcctgcctcaggcccagggccctccaggaagttggatggaaccaggcccctttgtccatttaattccccctggagagaagaggccggtgagactgagatcaggaaagaggctctggccctgcccctcgactctgatgcccctggggaacagctggggccaaaaccactgtccagggaggtgacccgttccattcctccggacttcctgagggttccttgcctatccccctgtccgaagtctggggggctgggatatggtacaccctccccaacaatgttctcacatagtagaaaccgtcatcgtccatgcccccaaacacagtaatgacatcccctgcccggaagggcagctctgcctgtggaaaacaagaggagggcatcaggcccaggaaggctctgccaccgccctttgctgggctctatctgagggtcctcacctccacgtccatattgggggaactctcctgggggttgtagtcaaatgcagccaccatggagtggggagctttcaggtcagcagaggggaccagcttaggggggcctgcagggggagtaggagaagactctggactctctggagagccctacaccccatcctgtcttctgccccggacccctgctgaccccctgtcaccacctccccactagctgtagccaatggggcgaggccagaggggccacccaccctatctccttccccagcctcccgggcccagggatattccttcacctggacagggctgggcagggccttccgactcagctgtggaaagaatgtgcctgtgagccccctcccaccctgcccacccaggctgcaggtgctgcagcgcaggccagacactcgcccacacacaaggaggcaggcaaggaaggctgccgagggcgcatctccccaacccttttgtgtggcagtgaactaacacccagaaagggtaaatggcacgctctgggattcacggattttatagtcaggtgcctgtgggaacagagagctccacaaaccatccctcatccccaccggaacaaagccccccatggggggaggcaggggatgtgggtggtctgccgattccctttacctgctcaaaaacccagaggtgcctccccagacagccaagcagcgccacccaccagcacacacatcctcccagcacctgagagaaaacagacagccaagcagcgccaccccaccgcacacacatcctcccagcacctgagagagaatggggtcttacccacctttcttggagcggcggggcttgggaggaggcccagttgtgtgggctgtggagtacacaaacggaccattccctgatccagaaaagcagagagaaagcgaggcaggggaggtgggagagacaggactgggactctggagtttcctctcagggccgtgctaggttactgagcttgtttcgtaagggcattcatctcccatccctgacaagagccccacccaacctccaggacccaaaattcctggctgcatggctgtattcccctctgcaacagacgcccactccacgcggccagcccacgtacagtctgaccactacgcagcagggttcaaggcaggctccaaggctctgctagagtctgggtaagtgggagcaccccagacacaacaattgctcagggtcaggtggagttggaagggggctggtgggaggtgggtgagggacagcagcaggtcatacctgagccctcaaggagaatatctggggacaaataaccccgctggagcagttgctgtctcccagcagggctgtccacagccacctcagccaccatgttgcagggaatgtagcctgtccggcccccaccttcgccctggtagaagccatcggcatccttgtccccaaacacctggaggcaaaaccagtggtctcagccagttctgctcactccctatgcccctaggccccgaaccccagcaacaccccacttggaaatgcagaagaatgttctcccttttgtatgccatgaaatgggaaaagggggaaaacagcaaagaacaggatcagagggataggagaagacagccctttctgtattatccccattcactgtctacatggccatgccctttgcccaccccagaatggatctccttagtctcagagcaatagcaaaatgcctttaatcaatacttggaggagtaataaaaatagtaatgtcagcagcagatagttagattgtgctgcctatgtctcaggcagtttaagcactttatgtacattggatcatttaatccacaaaacaccctgtgaggtagacactaatattatccccattttaccaaaaagaaaactgaggcccagggggcctaggtaatctactcaaggttacacagctagaagcagcagagtcaggtccaaacccatgtcatctgctctagaagccatgttctccaccatgattctgtgctacctccagtggaggaaaggagggaggagggaagacccagctggtgtttggaattctgagccctgatggcgaatcagtcaccttcaggatctgaccctctcggaagggaagctcttcttctccagcatcaggattgggcgacattgacacggggtcatagtcaaacagagccacaaagatcctgacgggtaggtgctggtaagccagtgtttctgaggggctcctcgcagggactgtggagacagtggagagggcggtgacgcagcgagctctggccgagcagctctagctccagccccatcaggtgctcacctagctctgcagtgcttggcctgaggactcggacacctctcttctgggggcccctccgcccagagccgtcctgccctctggcctctccggtctctgttgcctgcaaaaagagggcaacagatggcaaaagtaacacaccatccctctggtgggctcgtgctcccccagctctgccccatcagcgtaagcagcacagcagcgcaggagcacagcattcctctcccggagcctcggcccagcctgctggagacctcagacacccccacagtgggagggagggcaggaggggaggccccagccccagcctgcgagtagatgaatggagtagaggggactggagttggctgaggagcccgcgagaggagggcctcccgtcagcatcagggcaggtaaccctggacatggcatcacagtcagcgtcctgaagccattactagctatgcagaggaaagggcgaccctgcccacaggccgcaacaggcgactagtgatagaatattgtgcatcccagtcctgatcagcagaagcagcaaagcagtggaatgtgggtgggaggaggcaggtgagggagcccggaggcccggccccacctctgctgatggaggcaggcagcgtggaatgggagctgctggtgggcagcaagcagggccaccaggtggcagcaggcaggggctgcccagggcggggagtgagcacggacccgggagagtggctccttggctctgcccgtcgcactgcggcctctccgctctggttcccctttctcccaggctgggaggcgtgggtagggcttggggcctgaattggccttcggaggccccctgggccttcctacagttgctgtgccccaggcctccccatctccagggtagcaggagctggtgatgctgatgcccccgctgcccgcctcctgctcatcctccgaatcatattcaatgctgatttccaagcacttgggggaaaggcagctggccaggccaggctccagcgcccggccacgggagcacctccgggaagggcccagccggcctctcccgctagcctctagtccagtcctggggccctcaattacggggaggccacccctctcccgtgtggggcccagtcgtccagaggcctggggcccattgttgctgagaagtcggctgcagtgttctcggggatctggaggccgcctgcggcttgggggcttctcaggggagccccctcctctcctccggctgcttccaccaactaatccaggcatgtcttccaggcagtctccagccctggaggactcaggagacaagggacactggccaggtcttcggggctgaccactgtcacagcccagccccagcaatgcaggttcaggcgggccagggtctcgggaagaacagcctgcccctgacttctcctcctcctcgtcctcctcttcctcttcctcctcctccgggatgctaaagagcttcttgctacagaactgctggaggggcagctccaggatctgctccaagatctcctcatcgctgtcagtctcacaaaaggggtcgggctgggactggtggaggtggggaggtgggagtagaacacagcagggaagagagatgcgtggggaagaggagagcgagctgcgatctttgccctcaaacgaaggcaggggttacggacaaccccacagccctcccacggcttcctccgagaggagagaaccagagggacggtggctggcccaaattcacacacatatccagtgagagccaaaggaagaattagggaacacactctaggaaccatcaccagcccctgtgggacaggagcattgaggagcaggcctccccatcccctccccagaagctaccagcacaaggatcttaggtggcaccggcctcccctggccagggcgctgtatctggtgggctggagggagagaaggtacagaaatgaactcctccccttcccctttctttccaggagggcaggggccaatcctggggcacttcctatcttctgcttaggacagggcccaggccacagacctagaatgtttctggcactcagtggtggtcagagcacctgctgacacacagtggggaggccccggagtttgaggcctggggcccaacagcccatccctaccccgttaccttggccccattctccctgatgctgttgccagcaacctgcttctggaaggagcaagtcctggaacccagctcctcttcctcctcctcctcctcctcttcctcttcctcctggatgtctgacaggtctgagttgcggccgtggtccacgagggagttcaccagatgaaccccaagctctgctgtgtcctccttctgcaagaagtgaggcaaggcaggagagataaggacagtgagggggcacagggggttccaggcagggtcagccccagccacagtaacaagggtcctttggcagagggagaaagagccatgtcctaaatgggggaggcacaccatggctcaggggcagggtgggagaagggagatgggagccacatgggacagagaaatcctagaagaaaaacagacacatagcacagccaaaggtgtgagagcaggaccagagcagaggacaggcagagagggcaactggatttgcgctggcaaaaggtagggagacaggcctcaattctctgaagtgacacagtgtgtccccaaacccctacctcagccctgggcctcagcccagaccctgggtctcctccttggcacatctcggtatttggcgcctgctgggcccgtgctccctgggtggagctggaggccggacaggcctctcctgcagtccactcggcctcctgcttggccagtgagggagctgcggggccagggtccttctcacccagggtagatgtgctggctgtcctctcctctgaggtgcccagcactgctgccccagcctcctcctggaacagagagcactgaggaaggacccaagcccaggtccctctgccagcctgcacctgctcccctctccccagacagggtacctgggagcaaggtgctggagggtcctcgtgggacccttttgccatctctctggaagggcttgcagggggtgctcctggaggctcttgagttccaaggggagcagggtgctggagaggagagctggggtctccaggccctggggaggctgaagcaaggggcgctctggcctctgggcttgggtgcggtgaggggcaggagactcgggctggcaggctggccggagccagggcgggagtgataggagccgggatggagtccgccgactccccgtggggcgacatggtgcgcacgaccacctcacgacacacctgcagcagctgcagctgggacaactccaccagtacactgcctgccgtgggtgaggccacctccatgatctgcagggtggagggggcacaggatgggaagcagaggctgagacagccaagcgtgaggatgcactgacagcagtggcagctaactgacagcagtggcagctagcattacgccaggtactgtgctaagccctctgcatggcctatctcatttcatcctcctggccatatggcttcagtgatggaacagttctaaaatctgtcatgtgctgccaaagcccatgctcttaacccatctgcctcatggtacccaaatgccaggggctgggcatctccgtgccaagccagagagcctagacctctgagcatagcaagaagggacccacccccactcccagggtacagtgggcagggctataccttctgcccatcagcgtagatggcatagcctgtgacccggacaccgttggatgtgccagcagcatcgatggtgactgggagccaactgatgatcaagatcccaggggagggcccaggctcgatctgcacatccagaggggcatcaggtgggcctgggggcaggggggcacaagacccagtgatgcaggacgctccccatcagagatacctgcccaatttgctatttccctgataacgcaaataagatcagggtccccttcttccgtcacccatggcctggcctcctgggtgttctggacaacagggcccaagcccacatacctgctgggagtgtggtgaactgcagggtggcagcccgctgctccagcctctcccagcctggttcccagggcccttggggtgggagctgagcctccacttgggcctgatagggtgtgccaggccgtaagtggcagaaggtggcccagtaggtactggggctggcaggtgggcactcttccccattgaggtagatggcatgggccaagttgctattgccgggcacccaggtgatctcagcagatgtggctgtcaaccgatggacccgcagctggctgggcaccactccggcccgggcacccaccgccaagcaacagcgcagtgggtcagagctgccccggctagtcagggcctggacagaaatgtgaaggggcccggcccacaggtccaggttctccagcacggccttgggtggcgccccaggccccagggcctgtcgcagctccccattcacacagatatggaagccgtgtagctccacttgctcaggaggcggctcccaggccagcaccacgctgtgggccagctgcttgaggaccaccagacggcgggggtaaggcacggcaggaggctcgcccaggccctccggtgatgggctcagactgagctcgtcccctgcatcctcctcctcaggtctgggctggctccttcccacactgctttggcccccgctactgctgccacccccacctacactcaggaaactgagttcagggcctgagctgtgggacaaatcggccagctctggagggagggaggtcaggaggtcatcatccgacacacgctctacaaaattggaagggaccaggccccttcggccatccatgagctctcctggcaggaggaggacaggaaggggcagggcaggggaagacagagaggagataaagaaaaaacggtataataaatgcattttagcaactgctagtgggtgatcttcagcatttgattcaaatcaacatttaactgtcaattcttttaaaagacaagagcagtaaagatctggattagagataggtctgataatagtattttggttctataggacagtgcttcttcaattttaacttgcatatgaatcacctacagatttgttaaaatgcagattctaactcggttgggtctggatggggctgagattctgtgattctaataagccaccaggtgacactcaagctgcaaggatggaggagaatatcatgttctaagtaagcatgttgagtatttcaaggtaaaatatcataatgcttttaaaatcatgtttaacctacatataaagcaaatatgccaaagttttaacaattgttgaatctaggtgctggctatataaatattcaaatatattctgtacatttgaaaacttttgtgttaaaaattgcaataataatttcataatttcatattaaagttttaaaaaataagcaggtcaggataagaaaactggccaggcatggtggcttatgcctgtaatcccagcacttcaggaggatgaggcaggcagatcgcttgagcccaggagtttgtgaccaatctgggcaacatggcaaaacccaatctctacaaaaaatgcaaaaattagctgggagtggttgcacgcctgcagttgcagctactcaggagc[135 bp omitted]acctgggcctgaggaataggggccagggtgcccctcaacttctctttgtgaacagcagacatccacagagggagagagagacaaccaactcagcagggtaaaggaggaatctttagagacaaatgaagtaagtgctagtgaaatagtcacttgtaagttctagaaggatcaggagccccagcaggcctgtgtctagcagcatgattgacagcagtcaatccaggcaaccaccaatggttatgttttgttacctgcatcagttctcctgaagacttgacaagagagtattttaaaacatttgctgttgtttgattgagggatgtcaaggaagctgggcacccagcatgtaatgtcacggtcaatttaaagaagaaaaaaaggtctcaggaaacagacagctggtagctggtgtgctttattgagaggaagggggagcacgagccagggcttaggggagaggggtgagtgtaggcaggtctgagctgcaggggggcctggagtttcccccaacagtcatctgtgcccctcacctccaccctctctctctctgcctatgctaggcaaaaaaaaagtaaggaacttgaagaaacaagagggactgtcaataaattcactgatataataagcactgtagagggttgaatggtggccgcccaaaaacatgtccatgttctaatccccagaacttgtgaacatgaccttatttggaaaaagcgtctttgcagatgtaattaagttaaggatcttgagatgagatcatcctagattatccgggtgggtcctaaatctaatgacaagtgtttttataagagacatgcagaggagaaacactaagaggaggaggcaatggtgaccacagatagagactggagtgaggtggccataagccaaggaacaactggagccaccgtaagctaaaagagacaaggaacggaacctcccctagagcccccaaggggatgcagttctgccaatactttgatttcagacttctggcctccagaagaggccagtgagagaataaatgtctattgtttcaagccactctatggtaattgctcctgcagccctaggaaacgatcataagcaccagcactgtggagtgggagacaaaggcaggagtcttcacactaagaggatctccagcctgcagggctgaagctggagcctgggccggagtcaggcacatgctccagaagcccatgcagctgagaacagcctaggtggcccagacatagacgaagcagtcctttagctaaggttggacagggaatacggcatcttgcccccggtggcatttacatctatcccaatttatcccagatcgcagagttcaaattctagtcatttgtggttagttaatacttatgcctttgctgccccctccaaaaataaagtgtttgggttttggtttttgatttgggtggggtttttttttcttcatttataaagtattattttcctgaaagctttttaattctgatcttcataatctacccctgtagggagtttaactgtttaggccacaaagccaggtaccatgggtctcagcagctcctcaagtaacaggcagaggacccagggaaaagaaactgagcaggctcccaagcttccagggttacagattcagagctaagcctgttcctaaatctctacacacagctgcggctctcgccctgccctgtccatgccccatccaattctctacacagtgccatcctctctgctgctgatggactcagcctggtggtacccaggccagagccaccctgagagagtctcccaaggccatgtcttccgcaggcccatagtgcccagtctcaatgaggcatctgccttgagttgcctgatcagccctctgactccccacaggagctgcagaacctccctgaagcagacaccctgcctgggccctgacagctgctaaccgcttgagaacaccttcccctgggatctttaccctgattcctccttcgcatacctgactggagtccagcatcaaatctgtgctgcatacctgacctcaggtgtcactactgtgaaacactgccacgccctgactatccacacaaaaatgaatctagccaaaatctcctgtgacactctctccaccatctggactatgctgtcctgtcctgcttggagccagactcccttctttctctttccccagtggctactaggtctctgtatgccttttagctgagaccaaaaagttaaggtgggctgagcacgctgggcagaggggatggatggatggatggatggatggatggatggatggatgaatggatggatggatggatggatatccgtctttgggaacatgggctcaaaggcaggggaatggacagaatgaccccccactacattcctaccttcaaaaaagccatcctcatccatgttgccatagatgtagatgtactcgccagctgtcagcggaagctctgcttctggattctcattgggaccctcaaaggggttgtagctgttaggggaggcacagaggaggaggaggagagtgacctacactccacttccatgtcctgtcttctctctcccactgcactgagcctttacggagacttggttgtggttgtccaccaccagcaaagctgagccctcactgcacccaccttggcccaactaggttattagaataggtccattgtgtcctgtactgcccccaccacttccagaggtctccagctccacccggccccctcctataccccaaatgctggggctgggctagggggcagtgagggtgagggacccacctataacgtgctaggaagacctggatcctggctcctccccggctgccctctggcgcagctgggagcagggagacactgtctgcctccagctcctctacctcactggctgtgtccacctgggggcaaacagaaagggctggtttctcttcagggcctggggccaagcgccaagcaggcaggtttccaggctgagccagaggacctattgctttaaggagggaaaatgagcacatacatgctgcacaggagcagtggcaaggaccccctgatgctctctaaattagtgcctgagagagcaggtcctggcagagcccagctgccctgggcaggggcagtggggataacccagacccctccctgagcctctactgcacccgccaggaaataaagccacttccctcatctcagaggggcccaggccatgctggtgtggggagtgggtgtcaacagaagtttggtttggttccttaaggtaaaaactcagcaaagttgccaggtgcagtggctcgcgcctataattccagcactttgagaggctgaggagggcagattgcttgagccaggagtttgagaccagcgtgagaagcataacaaaaccccatctctactaaaaatacaaaaattagctgggtgtggtggtgcatgcctgtggtcccagctacttgggaggcggaggtaggaggattgcttgagcccaggaggcagaggttgcagtgagctgagattgcgccactgcactgcagcctgggggatagagcgaggccctgtctaaaaacaaacaaacaaacaaacaaaaacaaagaaaaaagaaacccctcagcaaagcaccccaactgtaaatcgctggaagcaaggaggcagaaaggaggcagaaggagcttgaggggtccctgcttctagccgagtgacagtgtgtctgctgttcagctctggaactcagaacttcccgtctacttgcccggcccacagcccagggcaccgcaacctcagggcaccccaattctctgacccttgttgaggttgctggggtagcctggggaacaggctgtcttctcttctctgccaatgcctgggagaaggggaccaagtgggcaacctctccacaaccacatccaaagctggcaccatccttctatcccacgagggggcaatagaggcccagggcttcgttctaccactttctgaatgtttggctctcagagctgcttctgacctgcctcctccaccttctggggtttgtgggtagaaagaaggatgagttgacgaccagagctatgagtgatgcccaggagcttagtaataataacagctgccccgtgttgagcacacatcctgtgtgccccacactgagacaggcaggttccgtattcatttaactctcacaacaaccttagaaggcaggttttattagctccaagattcagataaggaaacagaagcccagaaaggctcagtgacttgcctaaggcaaagctgggatttgaatcctggaacatgtgctttctcatacaaccacctgctttcactacagatgctcttaggaacagtctcattatgcagatcctggtgcccaagtgtctcctccatccagcccagcactccagagcctccctgggcctcccaggggtgggctggggtggccccaggtggggcttgcaggcaggcagtggagggcaggaagggctccacctgagcgcctcgcccacaggaggaatccacaggcctcccacctcccaacttgggaccccagaagttgccacccaactcctggggaccccagaagaggtcagggccacctgccctgcacccttccccaagccaaagccagaacttcaggccccaccccagcaattacctcaggtgtagggcatgacttggggctgttgtggatggactcggagtgggaggagttggagagagactctgccttcttggctgtccttcgagggaccccagtgagagtggcaggggcaggctcggaagactttggggtgcagcgcccaggggagcccggcgggaggtcaaggtctaaagagaagatggcacgtgggcttggggtctgtggcctgaggagggaccaggagatagggtggtgcttcttggatatggggaccaggccctccatagccgggcttccttacaaaaagggaaatatttagagagaaacttactaaatagaggtatagctgatttacaaatactatttcacatgatcgtcaaaacagcttgatgagatgcatttaattattcctgtcttacagcttacgaaactatggcccagagaggttaagcagcattctcaaatcacagtgactgtcaagtgagtggagctgggaccaccggatccgactgacccccaagcccccactctgcacaaggccacactgcctgctactgactcctagtgcccaacccctaggtctgaccattcaggtccttttggaaggagaggagcagtggcccacgatgcctgggccagactctgggacagtcactcccctgggctttatttttccccaacagaacgtggttctagccaggcacagctctaacctgctgtgtgactttggatgagttgctggccttctctgatcctgaactccctgctctatccaaaagcccaggcctggggattccaggccaatgccactggggtccaccttacctttggggccagacccccggcaaggctggggaatggagcagcagcaggggggtggtgggcagtctccaaggctcccacagtccagggcagatgtgagcagatccaaggggcccgggtgcaggcggaaagcctggagttcctgtgccaggaggctgaactgctcggtttggctgcggcactgttcttcgagctctcgaacccgggcctgggccaagacccaccatgagccgccaggcccctcaaagctacccagtgccagcccgtgccatctgtacacagccctacactgggtttcaggtcatatccatccacccagccccaggcctgggcaccagccttgccttggccaccccactgtccttaatgcatcagagcggagggtgaagtcctgggctgtgtcctgggacatcttcaccccagccccctccagagccaaggccggggcctgccacacactcaccaaccctcaggccctaggcgatggcacctctgcctctggctgctttctaggccaacagggatcattcccaccccatcatcaccaccatcaccgcaggagttttctcagctccactgctcatcaccctcccacaatcagcaactcaaacccgttccctgagagaggcgggcaggaaattccacaggggagccagggatgtcttcgtgatgggaatgggccaatgcccgggaagttttctcaggtctgaggagagtcccaatagcaggggctctctccggccactatggcgaggctcctaagttagactggtgatgaacttcctcatgatcagggtggctagagaggggaggcccagtgtctgacagacacggcggcaggcctgggacaaggggacagccgcacgtgtcctgtgggaactccaccccctatggattctcatgcctgctcccagtgacaccccctctgctggatgagagagggggactgcctgggccctgagggaggagatgcaactcagccagcctggagaggtgtggggaagtggagaacgaggcgctacctgcatggaatccaaggtagactgttgcaggaaaggaagcagagaacaggttagaaccctgagcgctgtgggttgctaacccagagagggaggcggagaagggggcctaagtggatatcatccagtcagctccctggactgactagcagttcctaaatggaaggatatctcagggtgaaggcagcctctgggggtggcagcaatgggagactgctgccaccagacttgggagccccctgcccagccgtgcccaccctgagaaataggccagtggtggaggggactcccccaggtcctggagcatttaagggcccctcctgcaacccctctccccaccgccatagtccatttcagctctatctggaggacccccgccttcctcccaagatggtggaactgggggccacttccaggcgccctacctccagcagctgcacggctccttcatgttccctctgggcttcagcctgggcctacaggtggggggaaccaaaatactggagggaaggagaaggaatggggtggagtagagagggctgcgagggaggaagggtagaaaggacagaggcaggggaggaagaagccgggagaaagaaaagggtagggagagagggaagagggatagggaagggggaggccgaagggtttctccctcctgaacacccaccctgaaccataccttagaccagaaggcaaaggggaccaggagaagcgtggctgagtcagctcccctctttcctgagcaaccatcctcccagtttcccccctacctctctggatgctccttctcagcctcttttgcctgctccctgtcccccattttgaatgttagggttaccctggacccagtgctgggcccagtttatattgtctactctcttcctagggctcccatctactcatacaactaaacacactggtggctccaaatatctccaagaccaacttacccataaccccaggctcatgtatccaagtgcctgtggacagctccccttgaatgtttaacgcgcagctcagacatggcccaaatggaactcagcactcgggatgacctacctctcagatctgctgccccttcatccttcacctcacggagtatgaagagccccaccctccaccaaggtttatacagcaaatggctgtcagagaagggattcaac[132 bp omitted]tctcctgcctcagcctcctgagtagctgggactacaggggcccgccaccatgtcaggttaatttttgtatttttggtagagacggggattcaccatattggccaggctggcctcgaactcctgacctcaactgatccacccaccttggcctcccaaagtgctgggatgacaggcatgagccaccatgcccggccagaaccttgtcagttctatctctaaaacataactcaaacccaggcacttgtctcccgttccactgcatgcatctctgtccagacagccaccatctccctcccaggccaccgcccaggccctgctccacgcctgctcccacagtccaccctccataataccagccatgtgatcctgtaaaattatgactcagatcatgtcactcccccacttaggatctttcaggagcttctatctactcacagagcaaaatacccaaactcttcccatggccgttaaggcccgacaggatcgggttcttgtctactcccaccacgctgcccatcccttgctgtattctagccacattggtctcaggcttcttcagctcttccctgccacagagcatgtgcatgtctacacctcctggctggcaaggtcaattgtcacctcctcagggaggccttccctgatgacctctaaagtggctcctcaccccatcccagtcactttgtcacatcaccctgttcttctccaccactgtgctcatcagtgtctgaaatcagctcactcctggatgctaatttgctgactgctcagggacctggtctttgttccccacagtctccccgacgcctagcacagtgccgggcacacagtaaatgcttgtggaatgagtgagtggcaaagctggtgtccagcagcctgccagcttccctcactgccgccccacctgctgcagtctccggacctcctcctgcttctcccgtaggctgagccgagcctgttcatgctccacctccagctgctgccgccgctgggccacctcccgcatgtgctgaaacacaagatctgagtcaaggccagagcccctacttggccatttctagagaagatctaagatgaggaagcctcaaacaccatttgctccagattcctctattacaaaggaaactgagcctggagcagctccaggcccaggcctcagagctagtgcccctcactaagaatattctgctgtcccacttgctccccatgccagggcccagcaccctctcccacctgcaccatctcctcaccttcagcacttgctccaggctctccagcttgctctgcaggccctggctcttgcgaagggctgagtccctctcctgtgtcacccccaggagctggcccctcagctccgcattctcccactccacctggcgagggggcagtgacagggagttgggtgggtgagccttgacccaccagcaccctcacagggggaacagtaccctacccctgctcaggggtggaggagaaagccccttggctggggaccggggcagtggtgggagcacaggtctccacagcacctgggcggaagtggtacctgctccttctctgtggctctcccactgagccgggagttctcctccaccaggcgggcattctcattctgcgcttgtctcagctgcagttcctgagcgggcagaggagctctcaggagggagcccagcacccacattccccctctccccacacagaggaccctgccctcctcccaggcaaggccttcctcccctgctggaacctgcaccagccaggaaaggaaaggagcaggagggaaaatgtgttcttgagggcagcaggggtgggagcagagctgagagggagcccaccacctggctggccggggtgaagggaggagctggcctctgggttgccctcaagagctcaccagctcctcacatcgcctctgctttttccgggcttcctgctccaggctctcgcatttcttccgcttcttgctgagctccgattcctgaggggtcagaaccaagtgctcctcatgagggaaggtacatctgcccacagcaggctgcctccagcccttgacctaggacttaccagctgctgcaccctctgctctttctctggctcccctagaatcacgggtaggttgtccgcatcctcctggggcgtggcctggaaatgcccaggggcaaggggctggcacctgagaacagggccccagggcagcctgccccagcccagcctgcccagagcaggttcccaccccatcattcagccagcaagagatccctgcctagcaagagcaaagaggggtactgtctgcccacccacctcccattgtctccagctgatgtgtaagtacaaaggctgcacccctgtgtcctggagccataagtgctttgagatcctgggacccacgtgtgccctgggagatgggtcctttatccaggccaaagctttccctttttagcttccagcagcagccctgctctgcactcaataactgtcctgggtgtccttcagcgactggcagagaactaggaggctgcctgggcccccggggatgtggtgttccccaagataggggttctgtatcatccaaatctgggcttggcctagagcagcgcaagtccagccagacccttctcctggcttcccccaagcccaccctaccacaccttccgattatccgtgcaaactttgggggaggacaggtcttgatgggagggtgcatctcccttccagggccagccagggagacaaaatctgagcaagaagcctccccccacccggaggtcttggtcactatcagatcactgcctggtctctcctcccagccctcttcccagaaggaggaggacctacttgctgcctacctaggatgatggcgagaagccagacccttaagttctgggggtcctaagcgggtccctggccctcgagacaggggctgcctaagccccccgctcagtgagggttgcctgtacctggagccggggcggacgcaccgccgcccccgggtagctggggccaggcctggccagccaggcgggcgctgacgggggcgtccccgctctacggcggcggcgggaggaggcggcgcgggctgggccccgggcggctgccaggacaaccagggatttgcggccgggccgtaccactggcagcgcggcaggggcggccggccaggccccgctgggcgcaggcctatggagggcggaaccctggagcccccaggggagggcacggcgcaggtacgagcacgggaggcttggaggtggaccctgcccaggacgggaaagctccccagcccctgggagtgcgcacaccaccactgagtccttggggttctgagcacggtgcaggggagatcccggtggtcgttccccccacccatctgcacgcacccacacacctgcccttgcgccggcgctcacctctcccggggccccgggagcaggcgcccctgctctggcctggagagcagggcccgggggccaggacggcgggagcgggagcgtctcccgctggttgcgcagcgcgatctgcctctgcagccgcagcacctcccgctgggactcgcgcagcagccgatcgaagtcccgcacgtggagccactggggaccctcctgaggttgggggacagggacagggaggggactcaggcctaatccttgcccgccccatgccatcccctgcagagcccttcgccttgctggaggggctccgatgcgcgagactgtgcacaccctcccatgggtacatgcctggttacatgtgcatgcgtatgtggccacatgctcccgcgagcccctatgcggtcattctcagtaacttatttcttgggtgctctcaatgtgcccagcactgtgctaaataccttgtgaacatcccttcacacaggggatgtgtggatgcatacagccagacccaccggcaaacagcctcaagcctggagcacagaaatgcccaggtctgggactcatggctccacccccttctcccctctcccacctgggccgttgccaggggaacctactcccagcaacctccaccctccctttcatttgcgtctcattaacatcttgtctgcatcccacaacaggcagatggccctgtgcagggctgagctggaagaggtgaccagggcctcctcgcaccttgcccaccagagtgagcctggcctgcagctccctgcactcccgctgcaaggcagcaatctgcttgtccttggccagcagtgcactggctgtctcactgaggtcccgggctcgctggcgggctagggccttccgacacaactccaagctggtccccggccggggcaagggggcactcacctagccagaggaggggtaaggccaatggtcacctgagggctggggcacttctcccactcctcatctcctcccaaaggaggagttagcatgaaaacctaggggggtagccacctgcttccaccttgactggggtctcagaaaaccagcagcctcactctaccccatcccagcagttggaaaggattaactctacatctgagtttaggatcaaaggatgctgctaatttggggctgccactgtgatgggtctcatccctgcccccactccagctctataccctgagatgagctcagcagaaggctgccgccagcaccagcacgtggtaatccagaatcctgctccctgcctgctcaggaacctccccatccagctcttctctgccccctgcagctccagaaacctttggcctccttgcctggccagcctctgcccttcctgcaccttagcccctagattcttgctttcctaggtgctgagctgagaccgtgactcccaagcttcagacagccctcaggcccagccctggctcccctcttccttggtcacccagcctccgcccagcagcctcctttcctcaccaccctcaggttcgtttcctgcagctttcgggccctctcctccaggcgcttggcaatgaccgccagctcggcgttcttcctcttcagcctccgcaccttctcttctgtctcagggaagctgctcttcctctgacaaggggtcaggcagaattggggcatgtagggagcaccccacagacccagtcctaacagcccaagtcttgggctagagccctaggctcacagtggggtccttggcaactctaggcaggggttcaccctctctgggtctcaggattttgtcacctccattgagcccccacttggaaagatgttcatggggtgaggagggcactgaggcagagggcctggctccagccagaacgcagcaccccagtctccaagcctcaccagcatctggttttcctccttaaggatggcacagcgctgccgcagctcccccagggccctcagcagctccagattgggcctgtccccaaagctcatattcagcttggcctggcatgggaaaggaccgaggacagcacctcagaaacccacgtcacccagccagagccttccctgtggaagcatccaccatccatggtccaaggagacatggagatgaaacggtttcccctatgtcccaggccttcagagaggagcagaggaggcctaggagaaggaactgtccagtcctccctgtccacatagacacccccaaacctggcaccctcctgctcctccctgatccttcccattcctacccatcttctcctccagggacatgcgagctcgagctcccactcccatccctccagactcccctgccctcccccaaagtcctgttccttccctcttctacaggagcctgctcacacccaccccaaccctgcctcagcccagcaccaagccccctcccctcaatctacttcctctgcactgattctctgtgcacctccacactccccctgtatcccccagcccctaaggacagacagactcatggaagaagagacacagacagacacactgtcaggaggaggcacagagagggacggggcagcagcagggccagatctagacagacaggcaaagagggtcagaaggacagacaaatgacgaaagaaatggagcccctcagatttctgctcgatgaagagaggacagatagccacagagatggacccacagacaggccaagagaggacaggtgggcattggggatgcatacctcgcctcacctcctggccaggctggaggacatggtgagagacccccaccttgcagaccccagccctccacagatcccttaccttcaggaaagcctccacttcctcatcctctggcctctggcaggcgggtccagagctggatgcttgctggcccaggctgggcagacaagcctctgctccttcagggtcagttccccccacgggcctggagctcccgtctcctttgggcttggaactctcctcagacctcagttcttgaagctgcagagctgccggaggagtatcagcgatgcttggggctgcactgctaggttcaccccctcgacctggagtccagctatgccaggtgggcagtgcccatggctccatggctccagggtccccaggccgtgggagggttgtcagttgctccatggtactgccaaggggccccagaacccgggccgggggacatcacccagccaggtggggggactggcgagggtcatgccaggccagcccctctcccctctgagctcttgcttcaccgacgctccatccaaggttggctgagctcttccccacccacaaaggaggctgcagaaggcgccagggctgctggagctggagccaggggtatgtgagctatgtttgctggtagctgtgtgtgtgcgcgagtatgtggaggagcgagggtgtccctgtgggggtagggaggatgtgcagaggccaccgacagctgcgcctgggtgagggtgcgtgtgtgtgtctccaggtctgtccgtgcaggtcaatgctgtctcatgtgttgggaagatgggtgcccccacttctgtgtgttgaggggggtggtgctgtgtgtcactgtctgcccatttcagagttgccagttgtttgtgtgtgtgtgtgtgggtgtctgtattgcagggctgtggcagtatgtgatgctgtccctggttgtatctgagtgtgtcagtgtcgtgcagctgtgtgcatcggtgtcgttgtgtgtctgtcagtgtctgtgggtctggccgtctgtcgcaacccctcagcccggccagaggcttcaggagctgctgggggtgatccccagtggtccgctgtggtcctttatctccggctctgctctctgctgctgctctttcgcttgctgggtggctgggctggtcctaaggaggcctgggtcgatgggctgcttgcctcatagtctcagcccctgctggcctctgctctggggactgcaggggtcccttacagtccaggagcctcgagatggtgggctccgaggagggctgagcctcagaattgggtgggggggtgagccgggaagagccagccctcccctcctcctcctcctcctcccctcccacccaccaataggaagtcggctgctggtttccatggtgatggcgctggactggtgggctgaaccggctgacagggtcggggacagaaggaagagcaggtttctcacggcatgtcagcccagggctcccacatgtggcctcccaccctcatcttcacacattctcacaccttccggagtacagaggcgagtggggtgcagatggtcctccctacatcgggtgagactgatagagacagaacgggggagggtatgacagagatccagccacagagaagggcagaactagaaaagatgggacttgagatgaaacaaagagagagacagaaaccaagagaaagaaaccgggaagacaagcaaagagacaggtagaaatagacggagaattccttctgcttcctcctggcagattgcacttggggggcaacctggctgtcccaggccaccagggaagcccacatggcctgttgggttggctttgtcccgaattgcctggaagttcatcttctgtctagccttagatcttgttgctaaataatttgggggacaaggacgtgagaatcccctcagccaggagtcagtctatatgcagtggcaggggtctagacagagtccccagagccaggggtgttgggagaagccccgagaggcagcccctctccactctgaacccgggactcattaggcaagccagtttcagccaaggtcgggggccctcgtgtggcacccccacagaatagcagcggtgatactgaaccctagagcccctgactgtgggctccacccaggcaagagccaatggaactggaggtagggggtgcatggggaggagtggacatcttcacttccctaaagcagtgtgtaggtcaacacgcacgccactgcatgatgtgttgctgtttaggtcagagtatatatgcatgccattatgcgcatgcgtgtgtatagtatgcatctatagaatagacattatctatttctgtatatgtgaaggggccattgtgtgtatatatgtgtgtgctattatgtgtctatgagtcacataataaaacgtaacaaaaacacattgggtgtatctgtatgtatgtttctgtgtcattgcatctatgtttgtttgccactgtgtctatgtgtgtgctgttatgtgcatgggaggctatcattgcatgagtttataaattacaacacatcatgatatatatagatatggatgctactatatggcacaatgtagtaattgattacacaatatatgacatgctcatatcgtcatgtaaatatgcataatgacatggtttgatttatatatatatatcaccatgtatctatgtattctatatttatcatgatatatgaacatgtctctatctatgtatgtgtatggagccaccgtgtttattatgcaaatgtcactgtatgtgtgtgctcttctatgtgtaagacacgccctatgtttctatcattgcatgtgtgtactactgaatatgtatgtgccctgggtgtgtgtaatccctgtgtgtgtcatgccagtcatgtcacatgtgtctgtgtgtgtgttactggcacactgaatggggcctctgtgtgtaaatgcatttgcatctcagtgtgtgctttgtatatgagtgtctgtgcccttgtctaagatgctgtgtatgtgccacagtggattttgcccaatttttatatgacctaggaccccctagactttcttagattaaaactggatgtaggcagctttcagtttgggtatgtaggggggcaggatagggccagagctagggtagaaggtgagaggatgccttacatccctgcccctttctgcagatggcccaggcccttctctcctccggctgtggcctggccaggcccagagccctcttctgatctcataggcagggccaaacccgtatcttctggaggagcgacagaggttctccctcccagcccttctgtgcgcccatactgtccatgtgcctgccgcccgcattcagctccccaccccagcaacagagtctcagacaaaagagaagcacagtccagtctttattagcattgggtccctggtcccaccacccattcccctccacgtaccatcccttcccaccccttcctcgtccttgacgctgcggctgcatcagggttccacatgtccagccctccccgcccccaaagactgcagggcagcagaggagctgctgtggcctttccccagctgtccggaaccaggaagggcaggaaagccatggaggcctttcaggcatctgggcagggtagggaggggccgtaaggtgctcacctgtcacacgaggtccccgagcgccgaggaagatggtggcgggcagcgggcggcagcagtggcgtgatctccgaagcccacagtacactcatccataaagtaggaaacactacaccctccagtgctgttagtagtgctttctactttatgggtgactgcactgtctgtctgtccgtcggcgtgtactcttcaggctgcccaggcctcctgactcctgctccaagagccccccagccctccttgtggcttcctaagatccccccaaccctgccagggccccccgagggcccgccctgggccttgtgggcggtgactcagcatggcgccagacttgcctcctctacctccctcccccacttcctcttcagttccctcttcccttccccctaaaggctccaccccatccccccagtttcagagacactcaggtagagactagggcctctggaggcctcaccttcagttctgtgaacccctggctggccgcttccagccacgctagccaccctccagcgtccaaatgaggcagccacagctcccctgccaaggtcttggtctccagtccaccccaaccgtgaggtcctgactgcccagagcctcagtccccacccttcagcctccccaccagcccaagatcctgaccccccagggcctaagtccccagcctccccaacagcccagggtcctgaccccccagggcctcaggccctggcctccccaccagcccaaggtcttgaacacaccagggcctcaattcccagcctccccaccagctcaaggtcctgactcccccagagcctcagtcccagcctccatagcagcccaaggtcctgaccccccagggcctcagtccccagccactccaccagccccaaagtcctgactccccagagccttgattctcggcctccccaccagcccaaagtcctgactccctcactgccctgctgttcccctggcaggagcccaaggctatcccaacaaaaatggtggccatgttgggcggaggaagaggctggcgccccttgagacactggtcccacttctcagcctctgcgtaccctctgccatccccgccttactctccagccctcctccttggacacctctttccccgcctggggtcccggagccattttaccttccttcactagagagggtttcaaggcgctttgccctgagcttcccgcatggggcttgcacccaagctcctcgacacccccaacgcgcctccacccagaccagcagcccaagcccctagaggccccgagctgaggagccccagttggggcagcagtgaaggtccggatccttacctgaggctgcagggcggaggagagctcgccctgtgctccaggctccgaagtggggttcccttcagggagggcagggcttataaccccgaggccacgtgggccagatctcagggcgcccaacggtctcagagcgcgccccgcccccgcccgcaggggatgagcgccctccctccctccctccctggggaggacagactgacaggaaacagaagggggtgggcccgcgggagggctggggaccctctctcatgccctgggcaggtggcttccggccccagctgcccttccccccgtggcaccagctccaagggatggctcaagagcctgggactgactcagggcattgagggtgaccccagaagaccagggctcctcgacagggccctcggtgagtgcccaaaacggggagtccagaattccagcacaagaaaaggaccttctctctgagccccaccgctgctgacctcagcccagaaaactcccttcccttcccaacactcaggccaggccctggctcctctgcgtgtgctcccgagggccatggaggtgctgatgcatgaagggcgtccatggagactgttgtcctcagcaccccacaaagccacccctcctgcagcctcagcctgcagggcacagtgcgggggacactctcaggcccggtggactgatggcactaggctaggtgttcacgctctctttgggacctgtggggacaagagggcagggcagagctgggtgaggatcaggtcctaaggtggggcacaggtgctatgcggagagaagggggcttggaggagtggcgggaaagaggctcgagggaaggttctggcggccaccggatgtgggcatggggcccacccacctgcatgccacccccgatttccccatggggaaggcaggaagctgcccagcccagggcccctggctgggggaggggagtagggtgtgggggtgggcaggggacagcgtcggctgagcccagcccataccatcttcccccagcgttctccaagcctctccatgggcttggctctggaagcaagaggaatgggtttggggaggtaggagcggtagagagaaaaccacccagtgactccttcccagaaggccatggacctcttctctgggtcctccgtttaggcccacacagaccttagggagctgtcagattcagggcctagaagaggactggcatgggggcagtggggagggagatggccccacatccttccctccaggaagggggtccttcaacctggaaagttgccccattcccaggtccctaaaatgggacagagaaagggggaatggggcctttcacccccttgagtctaaagagaaagtggtgaggagggttgccttgcagggccagctggccagaaatggggcgatactcctttaagagaccaccgctgcctctgacctgggtggaggggaagtggctgccccaggcgataagaggataagaatatcaaagttgtgcagtaacctgggttcctggacccccattcttcagggctcctcccctgagagcatcttacctcctactcctgcttatgatgcctccatagccctcacttcagaggcgtcctgtccccacaaaagagagtcacagaatgggacccaggagcccggcttctgggcccagctatgccatagacccctcagcatgtgacctgtggcgagtcagagctgaggttccaagggacacacatggctccaacagtctccaatctagcccttctcctgtcctgagcagggtgaggtgtccctgctgcctgttgtcttgtgacaacagaggctgattttctctgtacaacctcaatgcctaaagaccaccaatagtttttatttttatttatctattttctttttttgagaagagagcttagggcccagcttctctgtcaacggagcttctggggtcagggggtttctggatagtctaggccctctgctggttcccatcccgaggctggggctaaagaaggatggaatgaggacctggactttccccagcccagcgatgactcccgactctgctgggcctcaaaccagaagaaatggtacagggccagagacaaaatcaaggacaggggaaggggcagagtctaaaataagaatacagagacaataagaaactttgtgagaatggctaggatacatggaatgggccgtccacctgtgactggaacaaggctgctggactcgaagcctgacgtaggctgccaccacccagatgcgtggcctgtgtgactgaccagcaggtgcctgagggaagagcagccagtgcctgcatggaaacacacatgcagacacagcggcccagagagcccaaaacattcagacacagacacgctgtcgccgacacaccccgcagtcctgtacacacacctagaggaggcctatctacactcctggacacacctgcgtcctccccaagagacacagggagggtcacctgggaatctggggccagtgcttgacagggtgactggaaggagctgggggtggattcagaacataagtacctctgtgagagtggcctggctcccactcctgcctccaaagccacctgttgcctgagttccccaggatgagaaaaaccaaacccttgatgtctttgtggagagaggagttcaagttgatacttcaaactccgcctccttggcggccgatccaggttcaagcaggctgtcactgggcaaccttggctcacttggacttgctgtcaaaagtcccccacggccctccctggttctgacattcagattcttgctcagaggaagtagggggcgggggcggcaggaacaaggtgggaacagcccttcatcaggatagagggatctgggcttggaatcctggagggctccaggctcatggtccctcactgccacccccaccttaccgacctgggggacaaccatctctgtgtgccaagctgaggctgtgggtaggcaaaggtgagccggcagagaaaaggacacaggacctgtccttgggcactcccagcctgataggcagtgtgtacgagtgtgtgtgtcagtgcaagtgagtgtcttgtacccaaagcaggggcagagcttcaggtctgatggggacacttggttcctacttctagtgagcactgaatctgagggtgaagtagacacacacatctacatttaacatagtaacggcaacaggcacaaggccatcccaggtggcagttgccagggcccaaggggctgggatgttggatgctgtagtagcaaccttagagtcacaggagtcccatcagagaaggcttcctggagaatgtgagtacaggtggaagagggtttagaaggagagattgggcaaggaggagaaacagggagaaaattgtcttttgaaggcctaatgcctgtaaggagagcaggcccagagggtggaagaaatgacacaagctcattgtccgcacatgaaggcagaaaagaaaaccaacccttccctgccatctgcatgggcctggggccctcactcacaggcaggcaagcagccagtgggagatggcagcccagataacctgccttacaaagagccaacaagagagaagccacagacttaaccactcacaaacaggaagtccagaaggcagagcagacccgccctccagtaagctacagttggggacaggcctggccacaaaggagggaaactgagcccctagcattgcaaaatggggctaaagcaaattggagtcaatagtcccaaatgttgagacccttccccatctccctggaggggcagccaagggaagcaggtgccaagagaggcaagtgccttaagaacctaagacagcccatgtcccctacagagatcatctcagcacctcagaagatctgtctcatctcagagccttgggagcacaaggagtgctaaagggcctccaggcaaggagggcgggcaaactggctgcccctcagcccctgcctgctcgtaccagactcccctaggtttaatttcatactctcctgctctactctgtctggcaaggggcagctccaatgcacagtggcccacactaggaggtcacttcgcactggggcagggttctggctcagatctcctgggatcataagacccaaggacttttaagcagcaaggttaggcagcaactggtcccgagtcaggaaacagagctgcaagcccagagagaggcagaaggcagcctgaggtcacaaaacaagttagggccaagttgggttctttccacaacatctgggaaaaggcaggacgggctgggtggaaagggggtgtgggtgtgaggaaggctaccctgaccactgctgtgggagtggccgtgaaaccagaagctttctcctctgggatcttctggggacacaagtggagagatgaaagctccctctggactctctccacacacaggtgctgggtttaacttgcatagctgcacctgctccagttccaactgctgcaaataaattgtgtgtgtatgtgtggcggggacagggagggggtccaagagctggttttctgcctggaacccactacaatccctcatcagccccactccctatcccaacatcaggatcaccaagcagaggataaaattaagtgtcaagaaactaggggtctaatcctcaccctgtgattatttatggtacaattctgggccagtcactgaatctgcccctaaaccccagcctgtttcttcacctataaaaatggggagggagttgaccaaaagacttgtttgtgctctaggaagtccccaagagcacaggagcccagagacctcgcaggaggaagcagcagtatctgtgttccaaatcctgcccagcccccaggcagccatggtatcttctcagctggctcgagggcacacctcccaaaatgcagagaaggcagggtggctaggaatggctctagtagaattctccccttatcttgtctggaaacaaggggcaaagagctatctatttcctcctgccagcctcctgcccccaacaggattcctcacatcccaggaccagctggaaaaggtggtgagagttggaaagagactgctcagtgaggactgccctgcgaaccagcttggattcatcccgttcacctccacgttctgcactcggggccgagggaagggaggcagcccaggcagctagagaacttgatgaaacacactcaatctgaatctcgcttgatcgtcatgctgacccagtgaggtaagtgatggtatccccatctcagagatgaggaaccggaaactcagcgaggttaagtttcaccttcctgaaaatcgggcaccccgtttctgttccccagagggagctcaattcaaagtccccaaagaacaggtcttctgtgaagacctgttctcccctcacaaccccgttggaaaaagcagtgggagcgacccagggcggaccctctggcccaggcttgtgggttggggggcagaggggcctaactgggtggccaggtggcccgcagagtctctccagcagcagatggcctccccagccctttccttcagagcctattaagcagtcaaatgggggagggttggcccccaaggccagggacccagcagcagcagcagctcacagcactggagccgttaaaaagtgactcaaccagaaagtgcgtttgaagtgacgcccgccagggccccagagccccagagccccagagccaaacctcaaaaagacgaagtgagagagacaggcctgcgggggctgggccgggggtggagacccagcctggagctggcctggccaaataagggcaaatgcactagggcgggccaatggggcaacagcggctggctgcgtcatggggctgcggctctggggagggggaggtgagaagcctgggacaaaatgggggtgggtgtcaggggtcccggcacctcttcgaggggtcccagggtgggtgaacacaggaggcatggaagccctcacccccaaggagcctttgttactaaggtcagtggacctgcaaccccagagccccacctgcaggctggatggggttcaaggaagaaaaagggaaacctggaggacccccatgcccctgccccagttatgggccctggatccccatctgccatggagaactgaagggaggccatagggacagcagcgttgtgcaaggggaaaggctgaagcaccagtgcagcttcaccaggccactgactgtgggcgagagatgtaatggaaactcagttttctcatctgtgaaaggggaataatattgcctcgtgggatggcactgagggtcaaatgcaataatagaggtggcccattttgaacctggaaattgccatagggatgtaatagatgattagtgtagaggcacaaggccaaaggctgcttcttagattcttgtttccaggtgctataaacgatccctttgcaaggatatcatgtggttctcaattttggcccctggtgtctagaacaaggtagggggaggtgccaaggccagagggattcctgaatcttagtccctaagcaaaagcagaagagactgatgcctgcctgcctccagctgattccccagggacataccccccttcatttctcctgcatctcctcaccttccatgaatccagaccatgccccacccctcctcctgagaccccgccctccatctcccggcctctctggggtgcagggcagaggaagtgagtctactcagctgaccagagaaagtgctgcagctgcctgcacagggtgggccgactgctgtcttgttcagtgcctgtgataactcccttgcctcaggcctctccagcccctgctgggaccactggcccaggaggaagtctgggctctggctgccacctgcttcctctcaggagttcttctccctcccaagcatggatttgcatttccccctctgccttctgctactcaagcccccagggatgaggtgacagttaaccccccacttcctgctagtggccccagagcgctcacttccttccaggtattttccgggatgggggaaggggttgaaagggtggtagttgctgggtttggaaaggggatgagggatccattttggagagaaactgaggtccccctaccctgctgtctgaagctgctccttcccttccctcacgctcactctgtaacacaagagctcagtttgcaggaagaagagtgcataggccggaagcagcacacaggggctttcaaaatgggctaggccagctctctcttagaggcccaggcctctatccgccatagatagacccccaaggaaagttccttggacttcaagttccctatcgggacaacataatgtctgccctctacccggaaggcagagggttgagaatgggggagtgccaaggcatagaggggaaatgttttccatcctatttctcagaggatctggcatgctggtaccagcagcacaaggcagagtgttctctgcactcagttcccgcttcctgggatcttatggcagagaaacacagcatctttagacaagaggtactgagctaggcagtgtaggacatacaaagtagcagcgacccgctcctgaagtcaagctgaccagtctctggggctcagtcctctcctctaaaaagtgaggggctggcctaagtcatgactcccccagtcctaatgttctgtggtctgccttcactcctctgtagactctgcatttcaccttcccactggtgaaggcctcgaaaccccaagactgaggcaggcagccatgtgctcttctccccagtctaaaccttattggtgcaacctatagcaatttttaccaagtgtggctgtctgttctcctaggtcagacaagactggaagggggacagccacacatgagcaacagaagtgacagctgacaggttgctatgaatccaagaggtagaaaaagagtcagtcccggaaccatttcaccacatgatacaaaaatggaggtttacaacaatgactttgaaccaaatcaggttaaatcacattcagaatcttgtatccaaatagcaaggaagtatataacacatttttaaaaatttaagctaggtgtagtggcacatgcctgtagtcccagctacttgtgaggctgaagcgggagaatctcttgagcccaggaattcaaggccagtctaggcaacatagtgagaccctgtctaaaaaaaaagaaccacagaaaaacaaacaaaaaaacaaaaaaaaaacccaaaccaaactttatcttataaaaaacgagaacataaagattaaaattttaaaaaaaccttggccaggcacagtggctcacgcatataatcctagccttttaggaggctgaggccgaaggaacacttgaggccaggaatttgaaaccctgtctctacaaaaaataccaaaaatacccccaaaatgagctgggtggagtggtgcgcacctgtattgttagatactctaggagctgaagtgagaggattgattgagcccaggagctggaggcttcagtgagctacaatcgtgccactgcgctcctgcctgggaaacagaacaagaccctgtctttggaaaaaaaaaaaaaaaaaaaaagccctggtgcttgaaggaaaatgtttctgttttgattcagttttgatgtatttatgtatgatatatgtggtggaacacctattaccattacccaacaatgctggaaggatgaaattcttgtcacacctatctagaacttacctagagataggcaaccttggataatgacaattccttacatagtttacaactctcaaattgcttttgcctaaattattgtatttgatttttttttttttttttttgagacagggtcttgctctgttgcccaggctagagtgcagtggcacaactgggactcactgcacccgtgacctcctgggctcaagtgatcctcctgcctcagcctcccaagtagttgggactacaggcgtgtgccaccacgcccagctaattttaaaaaaatttttagtagagacagggcatcgccctttgcacaggctgatctcaaacttctgagctcaagcaatccacctgcctcagcctcccaaaatgctgggattacaggcgtgagccaccacacccagccaaagcaaactttttatttgaagtataacagtgaacaaatcctaagtatataacaatatatttccagaaagtgaactgacctacataactagcatcaagatcaagataaaaggccggacgcagtggctcatgcctgtagtcccagcagtttgggaggccgaggtgggtggatggcttgagcccaggagttcgagaccagcctgggcagcatgacaaaaccccgtctctaccaaaatataaaaattagctggatgtggtggtggatgcctgtagaccccgctacttgaggcactgaggtgggaggatcaactgagcccaggaggttgaggctgcagtgagccatgatcatgccactgcactgcagtctgggtgacaaagtgagaccctgtctcaaaaaaaaaaaaaaaaagtgaaagaaaataaaagaaagaaagaaagggaaggaagggagaaagaaaagaaagaaaaaggaaggaaggaaggaaggaaagaaagaaacaaaatataaccagcaccttaggtgcttctcatgccctcctccaccaccacctatcacagctaaccacgatcctgcccttaacatcatagttttgtcaactgcacttcctagacaagaaacttcattttagaggtgacttgggaaagtcacagggttggtggctggtggaggcagcagggccaggactctgcccttagttagatacatgtattttcatcgcacaagtctcagtgttccagtggggtgtgacggtgccatcatcagtctgcagattgagggaggtgaggaggaaaaagagaggttgggaggtgtggggcacacaggtcagcaggtgcgtaagagctgctggagtggaatagaagatgcagccaggggtaactcatgaagggctagactggtttcccaatgctctgcacaggaatccttgagtaaatcccaaggatcccctccctgggccattgccccactgcctccatctctttggctaattttagacttagggactagagtggtgggattagagtggttggtgggctcaacgtgtagggacaatgtgttgtaataacttcactcagaagaaagctaatgcctcacactggttctgttgaacacttatggagggaaaaaaacttgctgtgtttgtggacaactatgtcacaaacagttagtagccctaaacttagtgtggacattatatttcttgagctgaggctccactacttgattatggctaaaacacttttaactcttttcttccccaccccgagacagagtcttgctctgtcaccctagctggagtgcagtggcacgatcttggctcactgcaacctccgcctcccgagttcaagcacttctcctgcctcagcctcccatgtagctgggattacaggcgcccgccaccacacctggctaactttttatatttttagtagagacggggtttcaccatcttggccaggctggtcttgaactcctgatctcatgatccacccaccttggcctcccaaagtgctgggattacaggcataagccaccgtgcccagtcaagacactttaactctttgagtctcagtctcctcatcaccaaataaggatgttaactagttccagggtttctgtgagaatcaaatgagatactggatatgaaagccctttgtcaactgtatttgggtttgttttgttgttttctgagacacggtctcactctgtcccccaggctggagtgcagtggcgccatcacggctcactgcagcctcaaactcccagactcaagggatcctcccacctcagcctcccaagtagctgggactacaggtgtacaccaccatgcctagctaattttttgtagagatgggcttttgccatgttgcccaggttggtcttacactcctgggttcaaagtgatctgcccgctttgacctccccaaggtgctgggattagaggcatgagccacagcacccagcacctttgtcaactgtaaaaatatttacatgaaaggctttactgatactaaacatgaaccagacttccagacaaagttattattagtctgttcttaaacatgacctacctgcctctttcatagagaccagatgtcagggaggggacctgaggatcaagtagcaggctgcagacagactaggagtaacaaggcagaagccacaccaagagcaaagcctcagttcccaaccctggtgaaactgctcccctccaagaccagaccatcctgacccttgctctatcagctaccagtcctttcttgagctggaggctgcattatcaatgcactgccactgagctcctcagtgttctgggagaccctaattccacagtatgtggcagggaggaagcagggaatgaggcaagggcaggcaaggggaaggcagcctggctactattcctagtctctgtctgacttgcatctgtccttgttgagctagggaggaggcttgctcttcaggagagaagccaaactactgagcaagacaaggagagatcttaagatgctatgcactcagaacttcggcagccaggacgggactgaaactctgacagacacaatgggccaatggggcaggacatagctctcatggctgccctcatagccatggaaagcagggcagcagtaccaggaccgcccactcccagggagctgtgaaccaagtccttgtcttagtttctttgggttcccagtagaggatgggactccagcacctttctgcctgtctgggttgctgagtggcaccacctgcatgttcaagtaccagagaaagcaagaaagctaattcagcagcagctcccggggagagcccacttggcacagtctgtagagtccaggaaggaaaacaggccacccttcccccacaagcatcaatgcctatgctatgtcttttgcttcctgtgagactgtcagttagggcccagttcagtgtagggctgaggcagcctgaatgtggttatttgtgcaagctcctcttgcctcccctccccacaactgtttccattctcaccaagcagccacgtccgggtcagacacccaggacagcagctggggctttccaagggactttttgagaagctagtgaaagttgggtgttggctgcacagcctgggcacttgctgaaacgcacttcttccatccaggacgtaagctctagcctggcagggttgctttcaggttgaaattgaacagaaatcaccacccacggagctttctgtttgctgggctggggaaatccttgagaaactcagtttggagttggggttatctgaccattccctcagagcttgaaggcaccagagaaaatggttttggtttgaagaccatagtggacatgagcagcccggccagtcccagtttccctcccataggcctatgtgaggacaaggaaggggagtagacaaactaatcagagtcaggtcgcatctctcctccttcccacactctccaggccacaggtaacaagcaaaatcaactcaagagcaacaccaggtggctgagacacaaagccctagcacaggcagctctgccctagcacagcacagctcaccctgcagttgtggttctcagcatttcccctactattttggctgattgtgcacatattctatgtattgaaaaatggcccaaaaaggagagcaaaagtatttcacctttataatacttatataattttcacatagcttcgtttctacaatcacaacaatcctgaggtaaacaggcagggtgcaatcattctctttttagagggagaacaaggaacttagggaaatcaaaatggggatacgaacaggatttctgtggaaatttaaatgagaatttgtggtaaatttttttatcctaaaacaactcaccttggccgaaaaatgggatgttacccaaggtcccctactaggccggaggagaaaaggacctacctcctacaggggcacaaacaagggagactaggactcaatggtcgcccaaggcccaagggtctccagtgagtgcttgagactggcctaaggtataggaagagccgtgaagagaagaaaatagacaagcaggggagggaagaattattaaacatggtcaaggagcactctacaaagcctcaggatttcttcaagggatactgctgtgccaggtctcgagggcagaaggatacaagtgtgagacaccagggccaccaagttgatggggttactgagcctctggatcagcaccctccgataggaagcaaggaagcacactacaaaggctgcaatcccagaggctgagacagtcaagagggagtagaagggcctctgctgctctgggaaggttcttatagggcaaataagctattactgtgcctaagagaatggaagagggaggcaaggcaggtgtcatggccttcagaactttctcgaggttcatatttattgacatttgacctagagtccttggcatggggaaggcacagacctgggccacgggtaggaaaatcagcatcctactctctcctcaattccatctgttaatccaccaacccaaatccctcccaccccacctgtagtccaaagaagataaaatgataaaatgatgtgctgctctctcaacagtcagctgagtctgaattggagggtaggaagtatttgaagttctgttcatttagttccagaacaagaaataagcagaggcaggaggtggagagcaaagatgctggcagccttgcatcttgctaggtctttatagctgtgtctctggatttgtaggccactcctcgacttttcagctcccgcacgattcctgaagcaggaaaagaaacagttctgtgaggtaagattcagaagggtaagataggccactcagctgccaccttgaggggggtactataagcaaactggagttcctagactacttatcaatcgtctgcttggccaggcacggtggctcatgcctgcaatctcagcactttgggaggtcaaggtggatcacttgaggtcaggagttcaagactagcctgggctacagagcaaggccccatctctacaaaaaaattttaaaaattagccaggtgtagtggcttgcacctgtagtgccagctatttgggaggctgaggcgggaggatcccttgaatccatgagttc[134 bp omitted]taagaatgagaagaaaaagagggatacatgtagtcatcaaaagcaaaggttctaagccaagcacctgtagtcccagctactcaggaggcagaggtgggaggagcacatgagcccaggagttagagtccagcctgggcaacatagtgagaccttgtctctaaaaaaaataaaaaacagaaacagcaaaaattctggagccagaatgcctggattccaatcctggctcctcatttactacctggtgacctccagcaagtgatttaacctctctgtgcctggttccccccatctgtaaaatgctgaacctcatagaatgtgagaattggcattaattcagataaaaaaacttccacagagctttacagtaaatgaacattggctgttatgattattattaccttggggcaggcgaccagtgactgacaccgcatatacacctggcttaaagttacctgagagagaagaaaaaagatacaagattacagtgaagttagttaagactcaagatcaaatggaagcttaagctaaagaagtgatgcaactccaagagaagagctattccctcttttggctacaagtgttaaatgacaaggcacaggacactgcttccctgtgtttcctacaacccgatctttcccaccctgaggtcactcatcttgctgatttgagactccctaatggacctgaggaacagtaacaacactacaactaagccaaaaggagacaggccaacacttactgactcgctgccacttggagacccagctgtcctctggactcatcatcgcaatgattctagggagggaaaagaaatggagagtcagcctgagcctccctgggcctgagctcaattctgagagaggaatctaggaaaaagccaagtaccgagtctccactggaaagctggcaaaactgccttctgatgttgggatgaggctgactcaaagctaggactgacaaaagttcttcattcttatgtccttggccggccagccacaggtcagtttccatccccaaaagattatctcactcagctcacaaacatccttagcctaacattccctagaaaatgagacggctttaggacaaggggtccaatagttacaactaacacaactacaaggggtctagggcctagtgcaaagaggagggtgagtgaaaacaacggatcctcctactagaaaggagttcaacttggctaaacttttcctcttaatgacctatacatatggggacccctctaatgacctatacatgtggggttcccttctcagaacctcatcagtaagctgagactcaaaggttgagataatacatgaaaaacacctagcacaaagactagcacagagtaggtgctaaataagcattagctctcctcattatcctaatagtccttcccaggtagctgtgattccagaggaatggtaaggctattcaagggctagaagatgctgcttgagcaagatgggtaagcatttttgtcattcaacgcattcaatcaaatgcttactgactgcctattgtgtgggtgtaagcactgacatttgttgactgcctcaatatgcctcccctcttctctcagtaacaatcttggattcttatttgagaagattcccttcccatccaaatcctacattctcagccatgcgctgttaagtggaaccgaccctacctccaggggtgacaagcagaacactagcccccagccctgcagcctgatgggagataggcatgtatgcaggccatcctcctgaccacaagtatattcttctctgtcctttgcaatctatctttttagccttagggtccctacagcccaaccttatgatttaacctaaacagaattcccactgttctccaaaaacatcctggtttttcccatcctaagcctttgctctagtcactccctttatttggaatgttctctctctctctcacctcaacttcctcaaaaatcccaaacttcttgccttaagaggaaagtactacctcttccaattctggttgaggtcatctagccctcttccgatctttaatttgcccactctttaagacctaatatgcactagaattatacaaataattcctacaacctaacaacaaaaaaaccaaactgaagtcaaaaatgagcaaaggccttgaataggcatttctccaaagatatacaaatggctataagcacctaagaggctcaacatcaccattcattgggggaaatgggacaccaaagtcacacccatcaggatggctattattaataaataattaagtgttggtgaggatggggagaaattagaacctttgggcactgttggtgggaatggaaaatggtgcagttgctaaacagtatgacagttcctcaaaaaattaaacactgaactatcatatgatctagcaatttcacttgtggatatacagatgatccctgacttaccttagttcaacttatgatttttcaaatttatgattttgcaaaagtgacatgcattcaatagaaatcgttttcaaattttaaattttgttcttttccaggctagcaattcagtacaatattctgtcatgatgctgcgcagcagccatgagccacagcttctggtcagccacagtaacataagcgttctgagcacatttgaagtaggctaacttattatattcagtaggttgggtgtgttaaatgcacttttggcttatattttcaacttatgatgggcttattaggttgtaactcctcggaagttgaggtgcatctgtactgaaaataatgaaaagcagggacttgaacacatatttgtataccaatgttcacagcagtattattcacaaatagccaaaagggagaaacaacccaagatatcattgatgaatgaatgggcagcagaacatgctatacacatacaagggaatattattcagctcaaaagaggagggaaattctgttgcatactacaatatgaatgaaccttgaagacattatgttggtgaaagaagctaaaaaatgctactgaatgagcccataggtacctaagggtgcctaaggtggccaaattcatagagacaaagcatggtggttgtcagggacaggagggaggagagaacgaggagctagtgtttaatgggtacagatgaaaaaagttctggagatggatggtggtgacggttgcacaacagtgagtatgcactaatgccactgaattgtgtatttagaaatggcgaccgggcacagtggctcatgcctgtaatcccagcactttgtgaggctgagacgggaggatcacctgaggtcaggagttcgagaccagcctggccagcatggcaaaaccctgtctctactaaaaaaagtacaaaaattagctgggcgtggtggtgggcgcctgtaatcccagctactcaggaggctgaggtaggaggcggag[210 bp omitted]gag[139 bp omitted]gccgggcatggtgactcatacttgtaatcccagcactatgagaggccgaggtgggcagatcacctgaggtcaggagtttgagaccagcctggccaacatggtgaaaccccgtctctactaaagatataaaaattagctgggagtggtggtgggtgcctgtaatcccagctactcaagaggctgaggcaggagaattgcttgaacccaggaggcagaggttgcagtgagccgagactgcaccattgcactccagcatgagtggcaagggcgaaaagtctgtccaaaaaaaaaaaaaaaaaaaaagcaacagcttttgggcaatgatctaccattactacacctcccttcccttcattttcaaaaaaaattttcatgcatttaacaaacattattaagattacattctttcttctcatgttaagtctttgaaatctggggtatattttatacttaaaagcatgtcttaatttggactagacacatttcaagtgctcagtagctacacgtggatagtggtcactgtattagatgcatagcactagtatgtcccaaaataactgttgaggctggacacagtggcttacacctataatcccagcactctgggaggttgaagtcagaggatcattccacgctgcagtgagctatgatcatgccactgcactccagcctgagccacagagcaaaaccctgattcaaaaaaaaaaaaaaaaaaaaaaacccacacaaaataacccccaaaaacgaatggctgggcccaactaggattaacacttgccctgcatttacttctctgggtgcaggttgggtaatgcagaagtgaatgatggaaactgaagcggcttacccatcaaaggaagagctagtgcagtcatataccatctctcggttacccttcatttgtagatatgcatcacaattgtcacaaccatcatattcaaactggtctatagtctgggagtgaaagaaaaataaaggaaaaggagagataagcatgaacaagaccaagagaaaaagtagctttctcaatacttcgacctgctcaatttcttgtttccctatgttgactgtgtatcctaaggttccccacctactactctcaaagcttcattcctaagtcccaccctcccactccttcctctctcgttcccaattccgttttatctattcctttctctagtctactcagggtcaggcatcctttccgactactcactcagcagcggatccccacccgcctctgactcccagtgtctttcggctccaacgtaagttcaccgaacgtctaagagctgaggattcaaaggcatgtaagaccgcccctgccctcagctgcaagacctgtccgcgatcctacgaggtaaacgatggcctccttcggcttctcactccccctgccacctctgagttctgagacttaacttttctctttactgtcccacagccccattccgccctctttccccgaccttggtcccccatgggccctacaaccaggtccccgactgacaccttgaccagcgaacacagcaaacaggcccgcagatgccgcaggtccttcggcaccgtctccagggccatcttcgccgatgggaagaacaacagggagatagacgaccacagcctgtgcacccgcaggaagtaaatagctcgttacccagaatgcccaccacttccggcgcttagacttcctcttccggtgtgggcggacgccagctccgcccctacccccgccagaggagatggtttctcccgccagcaggcggggaggctgggcggccggccgccacctgggccggagcgcgtcgcagccacctgagcccgccgagggcgcggcggaggctgtgtggggtagtcagcgggcccccggggcgggggggcggctgcgcttgcgcgggagtgtgtcgggctgagccgcagcgccgagacgcgggctgtttgatctgggctggtggccctgggcgtcggtcctgttccccgatggtaacccgaagtttgtttttttttgttttgtctccccgttttagaagcattgggggcagtgaatccactgtctccctctggattgtctctgcagagaccgagaagaaatccagggacagccccacccctccttcctaactgcgagagcgctatagggtttccacttgcttcccacaggaatgctggcctgggagctacggcggaaaaaaatgcgtatttatcttttaaaactccgtctgtttgctcgttccggctgataatttatactttgcgcagttcttagcgcttagacacggttcctttactaaagaccatttgtaggagattaggtgtcctttttttccctttcatttcaccgtctaggaagcgaaatgccttgttctataggcactaaaccaccacccctaccaaacctttctcggggaagcagaaggggaacttgtgccttgtgaggaagcgacaaaggccccttctggccctggagacttcacgccaatggagcaccagctctctgtcctcgcaatagcccgagtgcaggcagaacgcagtcatttgtgtttatctgagaggagctttgggatataaatagtttcaggccccgctgcgctgtcattccagcccagcctcctgattgagctgcttccgggcgggctttcttcttgttggcggtcccatgctgtgttcagatgggctctgtgacaggtttggatgttttctatcactgaataaaactttccactttggaacatattttctacactctattatctcatgtaagtcctgcaacaactattaagtaggcccattttatggactgaaaaagcgaggcacagagtatttgcccaaggtctgagtcactgaagtatgataatgtgtgaagtgaacagtataataataatgactgaagcacagtaagaatccagtcatgctttctccttccctgatctcactaagccacacttttaggggcttacaaaccagttcttattgccaagccctctactctaccctatcctttcatgaatcggagcctagcctctgataacataaataatttacttctcttgatgtagaaagagatgacgttgttaccctgagtgacagtcacgacagaacaaaaccacaagaccagaccacatttgtggataaatatattagcaaataaatatatttcttaacatagtgcctgattcaagcgtctgtctggttcagatataaatacccatgtgggtacctaggtgctagtctccccactaactgagggaaaaaggttcccaggtggggtcctctgcccactttgccaccacattcacattccaaatgggataatgcctgaggggccaagagtggtcaggctgccctggggtgaatgtcaccctgatgaggcccatcagctcttgtccactcagtgaggccagacttgtgctctaatccactctcctgtgggtccctggcctgtatggcttatactggggagctgggcctctgggctgtccaaacccaagggtcacactttgcttttcctttgttgtccccattttccatccttgctctaagacaaaacttttcccagagaagaactctttgttgtccccgctcagctgtaattctgccttttctaccttcattccatccttcctctgcccagataaagtccagcagaaattcctcctttctacctctctgggactctgagacaggaaatcttcaaggaggagtttttccctccccactattcttattctcaacccccagaggaaccaaggctgctgtacccacctcagggacagaactccacactatagtgggaaagcttcagggacccctccttttagtgctcagggctcacctatgctactggtccttttggcaaaaaaggaaaatgatagagccagggttgcccctgatgtagcagccttactgtggaggggccaaagctggtgttcagagctcacccaaggagggaggtgataaggtgtcatgcgttctgctgaacccactggctggtatgaacatgaggcttggggtgagggaaaccaagtaggggttggagaaggagcagcacctttgtaacacctggctacccatagctagctttctgccctcaaaaactcagccttcaagggatccagcccacacacgccacaggcagcagctggttgcctggctggacatggatttgctgcactgcagatgttttctgcagacaaggtctggagctggagcaggaaacggcaccctctcaccctccaccatcaccagtcctcttccagtgcttctaggaagtacggcaaaaagaatggtgtttgctgtggtcctttcctttcccaggagcaggactctgtgccaggtagggcccaaacacatctggagcacactcttggttggagctaggcctgaacatctcacacagcctgttcacacagctcctcgagttcctcctctgagcctgtatttagagagcggggaggaaagaggtcattgagggtcaggccagggacctgcttctctcgcctgcagcagagtgtggctgagaggggaccacagggagggagaagcagagactgtctggaaagggtggttagattgaaagctaagggggccccagttgggacacaggggagagaaaaacaaatctaaagaaatatatatagcaaccagtgtgttaccaatacttactattcatttattcacccaataaatattaaggattcgttgtgaatttggtctgctaccacgtgccaaatagaagaccaaaaagaataagcagggacctggtaacctttttggagagaaagtatgaaaacaaatggccattacgccagtgggacaggacaggagtcacgagagatgcattaaggaaggagagagaccaggtccaagtgcagcaatcaggaaaagcttcctggaagtggggataaatgagctgattctgtaggaataggtaagaattagatttatgggaatagagaaggcaggagaatattctgggctacaggaactacaagaattgtttacccagtttggctaaagcatgggcctggggaagggagggaagagaatagaaaataaggttgagaaggaagatgggggctggctggtgcaggaacctttgaggccaaagcaggttggatttttcctctctgtggacaaacagaacatttgaagatttctggacagtttagtgtaaggcagatgacgctggcagcaatagggagggtaggtgagcagtggagctgtggtgcacaactttatgggacatactggatgggcagcactcagccttcgaggccctgtaagagggaagggaagagctaggaggctcctgcatggatctttagggtatacctaagacactggcagggccatcagtactggacttgaaaagaacatgataaagctagccaagatacagttaacagaatctggcactgattagatgtgaaaggcaagaaaaagagaggcactgaaactagttctgagtttgagagaaaagggagatagtggtgtggtactggcagcactcaaagtacacacacaatagggtccgaatggaatcacaaacacatagccaaagcttgcagtacatggctctctccccatggacctggatgtcctgattggcaagttccatgtcttcagagcctagcctggaacctagcacaaagcaggcatatagtcagaaggaaaaaaaggaaggaaggagaaaggaaatgaataaatgaatgaattggatgagggcagctcctaggtcctgcaggaagaattcctacactgaagaatatttcaggacctttgtgtcacctcctgggttggaagggttctagtgatggctgtagacaaagaactgtgtcatccatacaatgggggaagatggggaagagtagaaggtggaaggtcctgaatggaaaagagagatatgtgggcaagtaaacaccatgttaaagttgagaatttacgtgatcactgcttatgatatagggatgcactgaatccccaagaaattaaggtcagtcttattaataatgatgtgttgaagggaagtcctccttgttcttttaccacaggggaagagaagaaaacctaaggctccacagggctgctgggaaccacctgtggtttctctctctctcttttttctcgttgttcacatagctcttcttatatagcctcgtattatggttatgtgtaattatttctactatagctccccccgaggaacacttcttagccttctttgtatttagaactaatactgagctgtgagcattggtagaactaaaccagttattaaaatttagaaacacttatgtttgagctactaccccggggaccattccaaatgcctctttttttttttttttttttttttttgagatggagtctcaccctgttacccaggctggagtgcagtggcgccatcttggctcactgcaacttccgcctcttaggttcacgcgattctcctgcctcagcctcctgagtagctgggattataagtgcccgccaccatacccggctaatttttgtatttttagtagagatagggtttcaccatgttggccaggttggtcttgaactcctggcctcaagggatccacccacctaggcctcccaaagttctgggattacaggcatgagccatcacacccggccttccaagtgcctttctgatgcctcagccacaccagcacctccctgggacctccctgtgatctgccaactaaaggggtagcacctggcagaggtggggtgttcctgcactctagccagcatgatacgctgtcccgatggttaagtattttggttgtcatctctgctgtatccttctcagcttccatcaaccctttgttggctgacttcacctgtcctgaaatattcagctgtagtctcctctccctaccacacccacttccctctgaaaactcaccaggctgggccgacagcacctggcagtgcggataagggcatggcctgccctctgcggtgtcagaactccattcagaaggcccctccccaggtggatgtggttccaggggctggcgaggagtcaggcacaaccacactggctgtgaatttgagtaacaggggcctggggtttctggtagcagcctcttgtccaggcctggaggtccacagatcaaggggtgtgcctctggggaccaaggatatgccacactgggggtgtaatggggaaaaatctggcaagctgggtgcacagttgcatcctggggccgagagccaggggtgggctcggagggacccccccgccttttcctctgtgggtgtcgggcagagaggctggatttttgcaagttgaacagactgctggtactggggcagatgctggaggcgtcaactgggccaggggctggctcagggagggccctggggcactgtgggttagagagccgccccgaaggggctgctgagttggatctggtgacttgctgatcaggagaaggtggctctggctggggctgtgtccgaggaataggaggcctggactgggggactccggtttctgggccaggcttcctgccatgccactggaaccgctttttgtagtggtggtgccggtggcggtggtagtggacatggctggaaacctgggtttcccctgtgggcaccaccgagtccaaggaacgaggccgagaggtcacactaggctgcatgtccactcgctggggatcccctttagggctgcagtacactagggggtcaaagtcactgcttagggagctgcagaaagtagaactgctgccatggaccccctgtaggctgatgtccgtgcagttgaccacagagtcactggaagagccatgacagggccctgagctggagtcactggctggcccatctgccaggtacccactgcgttctgtgcaatagctttctccagatccactgctgtcagggggcctggcccggcgtaggggcactgggcaagcagcagggtgctgtgaggtggattggaggtggctcagtccccagccttgtgcataggggtgctgggctcctgccaggcgctgctgctctcctggagcccggggatgtgcagctctggggaagcggtgatgccgagggcccatgcctggctcctgggatggcaggaagggaccaggtcgtgggggccgagccactgcactccgggaagggcccaacaggtaggcagcagggaggtggtagtgggcatggccgggatgctggcgaatgaggtggagtcttcgacctggttcttggtaagatcgagagggtcccagggactgggaaaatgaatctccctctggaaaaaagaaccaagagcacagatgtttaactctacaaacctacagagaatgcattcagaaagacatggctgtagctaatctatttgaccctgagtagcctgtgagctcagagtttgggggatcaaggacgtgcctaagctgcctgtgctctgggactcctttgttccctccagtcaggttgcctgccctgggagggccactatgcgtgtcaatccctaaacctcccctcagccatttggagctctttcacccagggccactgttagcccatagggcacctgtgggtaccttagaaaaaggttctctttcctcaagatatttatttcactttcatcttttagaaaattatgttaacatactgattttgttagaatagaatattttattgccagaaaattggaataataaacatataaatcacccagatttagaatcaacaaacttgccatgaaatacaaataatttttacaataataaagattatctacggccgggcgcggtggctcatgcctgtaatcccagcacttgggaggacaaggcgggcgggtcacaaggtcaggagatcgagaccatcctggctaacatggtgaaaccctgtctctactaaaagtccaaaaaaaaaaaaaattagctgggcatggtggcgggcgcctatagtcccagctactccggaggc[239 bp omitted]atggagaaaccccgtctctactaaaaatacaaaattagccaggcatggtggcgcatgcctgtaatctcagctactcgggaggctgaggcaggagaatcgcttgaacccaggaggaggaggttgcggtgaaccgagatcacgccattgcactccagcctgggcaatgagagtgaaactccgtctcaaaaaataaaaattaaaattaaaaaataaataaataaagatatttacattttgaatgacgcttcccctcgagtgaggcactctggagcagtgtacagcccatacaactatggtggcagttctgctttctccccagcttcaaggctgcaaccctttcccaaagggaagccacattctagacctgtctgcctacacagaggggagtccttggcccacctcctacctgtgatgttgaacatgcagagggggcaagtccgatgctgatgtaaccaggggtccacacagttacgatggaactcatggaggcaggaaatgacccgtagctcctggagaaaaagagggggtccaaaccaaaggcttctgtagccataggaattgccaggaatcaggacatcccccaactcccttaggcctctccttgctattatctacttgtaaaagacctcacagtagaataggaatggtatgagctttggcatcacatagacctggattttgcacttagctgcatgacgttgggcaactttcttaacagacagttttctgctgtaaaatgaagataaaaaaatgaatctaaccccacccttcattgccatgggtctaaaatgagataatgcatccaaagcaccactgcagcctggcacgtggtacactctcaacaaacaatagtgctctttcactggaaggtcagaaaagtgaccaaacttcaggctggtccctgatctctgcctcatgcaggacacatgggaaacagatgtagccagggtacccataccagcccctaggcctgcccacccctcccccagcttcaatctccccagtctggtcatggaggtgaaccacaagacctgccttacctgcccctcagagaactcctccagacagatggcacacacaggggctgagctgcagctgctccctgagtctggccactcaccccgggcctgcctgcagctggcctggtacctcctggtggccagctggctgatggcccaggctgttctctgctgaagcggatcctgggaagaggaatggggctcagattggggcatgggctccccttccctccctctctggacccaagcttggactccgttcccagtcactcaggtagatcacatggccagttgaacatccttaggagttcgtctcctcggagctcatatgtggctctgccaagcatgccaagctctcccagtccacccacctgcttataccattagcttttcttcctttgatgacccatgagagaaactttttatccaaccgctgcttgacatttcaacttggatatctaataagcatttcaaacttataggcctcatcttattaaccatgggttcatctccaaccacatacctgtcttccccgtcttccccattatagcaaatggcaattccattctcttaattgctcaggccaaaaatcttggtgccgtccttgagtcctctcatatcccacaatcaatccattactaaatctgttggctttgccttcaaaatatacccagagcctaactattgctcaccattttaactgccgccttcctaatccaagctaccattactgtcacctggattcctgcaatagcctcttagatggtttctctgtttccagctttgcctccctgtagtctattctcattacaacagcaggaatgatcatattaaaacttcagtcagatcgtgatgccctttctctcacaacactccagtggctcctgtttcacccacagtaaaaaacaaatggcctcaacagtccaatacaacggggcccccaccagctactctgccgtctcactctgttccagccacagccttcatgctgttcctcagatacactagacacatttctgccttaaggcctttgcatttactgttctctctgcctagatccctttctcctcagatacctgcacagatcactccctctcccatttagggtctttgctgcaatgccatcttctcaatgtggccttctctggacttgcttttaaaaattaaccctgttaatttttactaaaaatacaaaaattagtagctcccagctactcgcgagactgaggcaggagaattgcttgaacccaggaggcagagattgcagtgagccgagatcacgccactgcattccaccctgggcgacagagcaagactctgtctcaaaacaaacaaacaaacaaacaaacaaaaaaaaaccttgttcccttgcattccctccctccccactttgctatcagcattatcattttttctccgtagtacatatcaccatctaaaacattatagattttacttatttagtctgtttattgtctgttttttccctctagaataaaaaagctctttgagggtaggagttttttgtcatcttgttcactgtactaccctcagcacctggaacagtgcctgacacataatagagcttggtgtatttgttgaatggatgagtaatatgaggagaggctgctggaaatcaacaaagacagacgctggggtattttgatgtaaatggttccataggtataaaggtgccttcttcacgtactccttccttctccctaaccacccacccacacacacgcacacgttcaccgccgccaaagaccccacactgctcaccggcctgctgtggcgggggcggcaccggatgcgcagcaccgaagccaggatgatcacaaagatggtgcccaccactgtcattaggatccacacatcataatctggctggggagtgagcagagagggaaagggtcatacttccgggatgagctgggtcaattcgggaggaaacacaggagcccgggaggcacatagctaactggaggttcccttgagtcctccatctgaggggatggagaggaacctgcaagtgggattaggtgggccctccctgcccaagggcactcagagaggatcttccagatgtcactgggagaagtactatctcaaaacccatgtgcttggggaaaaaagagaaagggacccctctgcaaggtgggagtttcttgccagtgagccgctggatgaggttcttggccagtagagaagccccaatcaggggtcatggatcaggggaccagggtttcattctagctctgctattccatgccatgaagccacagagctgtaaagaactttagaactcatctgtcctgatctgttcattctgtaggtgaggcccaaagacgggggaaaacttgcccagaggcacacagctgatggatgaagttggactagagggtttccaggatctctcgcagctccaggagtctaagggcttttggtgggagttgccacaggacaaagtagggctaagtgcagggcaaggtctggaggtctagtgtgcttacccaggccgggggctccttcagctcaatcctcacatgggccttttggttcttgtacacaaactccatcagcttctcagcgtcattaccccagatcaacaccactggccaggtcagccccagcggctgctgcagctacagggggaaagtgcccacagggctgctgtgacttctccctgcccttccctctcccctgagagctttatcttcctccatccagcccccaccttgaacacgcaaatgtccctgggtacctgctcagcagcagctcgatcctcagtgatgtcaaagaggacagcactggctcctcgctcacccgccatccgagcctgcagaggcacacagtagaggttgggctgaggtcagggaaggacagagcccacccacaggctagcctcacccctcacacatctatcccttcctaggattatgcccacagcacatctttgcacactcacatctacctatgcaaggggtcactgggtctaagatctcctcttctgcctcctgagctcactcaggtccccactgccttcaagggataatatctagcttttccttttgtaatggaacaaacccttaaggggggtttacagggtgccaggtggtggacctggctctaggatgaaagacaaataagacacagctcctgccctcagggtacaatcagcctgccttcactaagaggtatgagcacgaagagtaggagggacctgcaccccttagaaggagaagagagaggaagaaggggacagcagagaagtagagctctccttcagagggagctgggctttccagggcccagtcctgcctgcagggcatctccccagctcaggcaaaggtctaagagcctgggacgccactctcacgcaaggccaccatcacaaagcccctgtctcagctcatctcatgggctccctctccttgccacactctactttgccaagtctttctctggctccaattcaaggacttagaggagtccttgtccagtggtttatcctttcgtcccctcccttagggtggcattagagacaaaagtggggagggattcaaggggctagtcccatatggtgagtatgcacacgtgcatgttcaccaagggctccaagagtcagcttgaggaagcagaatctagccaaccaggcagaacagatagcagtgccagaaagagaacaaaaagcaggaatccagggggtgtgtgtagggaggggagtaaggaaagggagataagagctaaaggtcgggggaggcgggaggcacaacagcaaacaactaacaggcactgtgaggagctgctcctgggcttggcctggggcctcccggcctagcacagccaccctccagccttcctccctagggcaaaggttcatcttctaatggcatcaggctgtgattttacatccctgggcaccgccccccctcacccccaaagtctctggggtcttcccacaggcattgaaggagttaaccctcctgcaagtagtggtggcagcaagaagagccagcgctgggacttactcacaggctcagcactttgatctctgcctgtcttcccagggagagcctgtcagggcaggtctcctgccaggcaggctgggagcagctcctttccttgctccagctctctgttctccactccccagacagcagcaaggcccagggggccactcagaacccactgcctgcaggcagaggagacactcaagcggggccctgttttggtcaggaaggtaactttccttcctcccccaggagctaggcccagcctagggcccaggcttaccaggctaattgactagaaattcacaggaccagtcaattccagaatggaagtgctgaaggagttgagaggttcatggcttccatcttccctactcacttcctcccatctaagctactccaggcaggtagagactttccaatcttcagaaccctcctaacaagggtaagggagaagtaccaggggaaaaggaatccctggtagggaaccctactggtgatctcctattccagggatttggccaaggacaggagaggtcaccccagtagtcacagaattgggactcccaggcctcagttttcacacccctagaacaagaccctggacccaccctggcctggaagagcatgaggaagggcaaagactttcttctttggagattttgttatttcccctcccctctctctttgaagaattggggtaggaacagtggaaggcaattactgtgacattcaaacactccagcccattacagcccataattacaaagttgtaaaagtgatcaaagagcccagagcactggccaacaggggaaaacaaacaggactttcagacagtgagtccctgtgtccagaattctaggaataaaaagcaagatttggggacagatagcagtccaatctagggctatctatgcctcttgtccacctgcccccaagaaagtaagtggaggcaaaaaggaaaaaagtacttatttgggtactggaatttggaaagcagagagaggataggcaggccctcaggacaggaaggcagttttagaaagaatccaaagagctctttggaagcttcagagttggccagccctaggggcagcaggcaaggctgccacagcctctagcaacaggagccattacagagagagcaatgagagtgagttgcaattctgcctcttacttgcaggactcactggtcagctgctgcatttctctgggccttagattttcttctccagacaagagtccctgtatatcttctgctcatcaaaaatgaagcacctaccgtgcccagggcaccaagccatagaaggccaggccctccaaaacagctcataatatagttgtggagacaaggcacatacatgaagctataacgctgataatattctaaagcacaaaggaatagaaacggaagcttccagaccttttttcactccagaaggctctcccctctactatcccctccaccaacacacatacacacaatctggcacaaatgttcaatatagaaagcagataaaagtgaggctgcttactttgaggtaggggtggggacaggaaggaccttcagcctctcccctccacgcaccaggtgcgtccctgaaacctggacttagcagaagatggtgttgaaagcatgcacagacaccctaccctctggaggcatgcccccagggagggatttctgctcctactgggctggctgggcctgggctggtcaggaaagattcagtagcaaaggtgggattcctctgggcttgaaagttaagggtgaaaggaaggagaaggaatataacctttattgagatccagtgcccagattgcctaggggtgaatcctggctctgataccaactattagctgtgagacttgggtcaagtcacttcactactctgtgtctgttgtttttttctgtaaactgggataataacaggacctagtccatagggttgttatgaggactacataaacgaatccacacaaagcatttataatagtgcctggcacggggtgttgcttaagcattagttattattatatcaactattataattataattattatttttgagacagagtctcactctgttgcccaggctggagtgcaggggcgcaatctcagctcactgcagtttccgcctcccgggttcaagagattctcctgcctcagcctcctgagtagctgggattacaggcatacaccacaaggcccggctaattttttttttttttttttttgagacggagtctcgctctgtcaccaggctagagtgcagtggtgtgtggtgtgatctcggctcactgcaactgccgcctcctgggttcaagcgattctcctgtctcagcctcctcagtagctgggactacaggtgcgtgccaccacgcctggctaatttttgtatttttagtagagatgaggtttcaccatgttggccaggctggtcttaaactcctgacctcgtgatccacctgcctcagcctctgaaagtgctgggattaccacacctggtatgagccaccacacctggtccttatatcaactattattaatactatgtgtttccgacatgtgatttcatttactcctcaaaactctataagatagtcatcagccccacttttgaggtgggaaactgaggctcagaggaactgaataatttgcccagggtcaccaactgagaagcagtggaggcagaatttgcacccaggacctcagccttcagattgcctgttctttactaccaggtagtggcctccatggtaagagaggcagggcttgcacccatctgcttttctccagatctagctccttctagcaggcaaaaggccactgcactagttcaggcatgaggtgataaggctctggcttatcaccaggatggctgtggagctgctaataaagaaacagaaaccaatctgggtgactggacagagggtggaggggatagtggggtggtgacaagaatggaagcctccagaagaattatggtgagggtttcagaaaagaataagcgagataacaaatggaaggaaaaataccgcaaccttgttaactacaaaagcacggaatgatgatgccagtgatgatgatagtaatgataattgcaatcatttattgagtggttaccatgtacgtggcatggggctaaaaacttccatctgtactgtctcattaaatcctcctaactacttacaagtcccattattattccccttttacagatgaggaaatagaggctggcttagagaggtgagctaaaaaagtccaggtcacactgaggggcagtggaggagtcaggctgcaagcccagggctatctggcttgagagccccagctctgtcattggtgacaacaccattgacaccaacaggaaaagccaaagcagagagcagagctgcaggggtcagtggtttccaaactctccctcccctaagaccccatctttcccttagacctctcatgagtcacattttaagaaaaacagatgttcggctgggtgcagtggctcatgcctgtaatcccagcattttgggaggccgaggcaggcagaactctggaggtcaggagtttgagaccagcctggccaacatggtgaaaccctgtctctactaaaaatacaaaaattagccaggcgtggtggtgggcacctgtaatcccagctacttgggaggctgaggtagagaattgcttgaaccctggaggcggaggttgcagtgagctgagaccacgccactgcactccagcctgggcaacagagcgagactccatctcgttaaaaaaaaaaaaaattagctgggtatggtggcacataactgaaatcccagctactcaggaggctgaggcaggagaatcacttgaacctgggaggcagaggttgcagtgagccgagatggagccactgcactccagcctgggcaacagagcaagactctgtctcaaaaaaaaaaaaaaagaaaaaagaaaaacagatgttctaccaaactaactatatttattacttacaatttattttctcatgagataacttgtattaacatgttgaactaacagaattccaaccaaaacaaaaccaagtacttgaggtaagcccgtggaacctctgaaatattgcaggtagctcaaagactcataggagtcacaggcaaaggtctagaggtcctgtgaggtagcaggccagggtgcaacaggcaaaagagaaggcccacagctgtggaaagggggcagccccagcccagctcccaccaatagcagcaaagcttctcggaatccttcttccccatctctctctctcatacacacacacacacacacacacacgcacacacacacacactcactatgtaatgcagtacaggcactgggaacttgtttaccaaatgaataaatgagtgacatttgcccatattttgtaaggaaagagaaatgaaacatccagaagtagggcaggcagctgcagcctaacaactctgctgccatgaaggctcacagccttgcagagatgccacactccccagctcctccaagtgcatcctgaccccctgcttcccaccatctctggagtccccttccttgtcagcacggccaggccaggtgaatatcttcacccacattcagaatcctgcccacatccctgcctgccatgggatgaggtaagaacccaggctgtttccttgtgcccaggagaacgaggatatccacaagggatctgggcctgagacagcaagctaacacaaaggccgggagtgtcactctcctctctcaccacccttgggggcatacccgtgtgtgccacacacaatctgactacactccacacgtatgttcagttttccagctagaagggaggccacagatagattaagcctagttttgagaaacagacagggttggattcaaagttcagctccaccccttcctaattgtgtcatccagcaagttacctgacttttctgatcttcacttgtctcatacatcaaatgaagaataataatgcctacctttcctgattgtcctgaaaagtgaatgagatcatacatacaaagaatctgtcccatgtccacatggcacattgtaagcacatagaaaacagtaactgctattgttagttaaagcagcagtcacaggcaaaggtctaaaggtcctgtgaggtagcaggtcagggtggagcatagcaaaagagaaggcccacagctgtggaaaaggggcagccccagcccagctcctacaaaccatggcc[131 bp omitted]actgcaagctccacctcctgggttcacaccattctcctgcctc[179 bp omitted]gtgaaaatctcagcttttatataaacatttttaatttttaaatgtggcaattaatatacacattgaaaagtcgctgtgagggttaaacacaacatgtctgcaagccaaacccagcttatgggccaccagtttgcaacctcaggggaaaagtgtgaactttttaagggtggggcaatggtttctatttctgctgttcttgcacagtgctcagtgtatgtttctaaaagatggaaatcccttcaattgaccccttctttgctctggtgcagagcaggggaagggactcaggaactcccaagtgatgggaaggaggtgggatggggagcatgctgggatgaaggtcaaaaagtcctgctggtgctagtcggaggagaaaaaacagaggtgtgaatttccacttctctcagaccagtcatgggttagggaaacccaagggaatcaggtacatcactcttaggaaacatggggacaagagagcacagggtcttctcacagcccagagctgggtgaagctccgggtgtgtgtagggcgaagtgtgagtctaccttgctagccagtgacaggcaggggcggggggcccgtcgaggactctccagcttgacgatgctgatgaatccaggctccagattgtcgtcatcactggcattgcacaggtacagcgggtgggactgcagagagagacagacttgggttagggaggctttaggcagcaggagtgagctgtgagagccatatacctctccatttttctagggaggtaccaggcaggtctcttggtgctgtaaaagagtaggccttatgattggattgcctcttagtaagctagtgaccactgtttgtcacttcaggatgctggggccaaggacacaggtagtggaggcagataggagggagagggtgtcccagaggggacctaaatgaagagcttgctgcaaagcaactctaacaaccttcaactccaacaatcctacttctctaaactggccagacgcagagggctcctctcctggccccagcctctctacctcctgatccttctacctgctccccaagccccaggctaagagaatatccatgtgtgcctgcatcagtgctttcagaatgcccatgggcagtgctggatgctgctggtgcctcctgcctcctcgggatgcccccaggcaactgttgccctgtagattcccatttctcaggaggctgggtcatctcactcggtgctaccttgcttctctcactagccccttttttgcctctgccctgtacccatcctgggatcaagcatggtgttgacagagaggtgagactatcttgcaatgaggcttggctaagacataagctttgacagctcaccctggtcccaggaatgatgccgtggaggtggagccagcccagcccatctgctctaagggcagatcctgtccaagaccctgtgcctctgagcccagctggtgctgaacaatgactaaaggagaacgtgctgacagaaatctgaggctctcctcatcaaaggggtgagaccaccttactctctcttctcattcacagcgatttgtacacccatttgaatctaattttccctaaacaaaatgtcagagtgcaatgagaacaaagtatgacttatttggccctgaataatcctatggtccagggactcctatatagtagaaaccccacatatcctggcaagaaagagatttcttattagagagctgcccacacttccccctctactactgttgatgtctgaaggacttccagaaagaaccatcagaggaaccacagagaatcttgaatttataaagatgtttatgaagataatgtcaatgatggatttaaaagcacactttctgaaagctctttcaggctatttcctctcactgtgtcaccgcggtcccttgaacatagtaggttctcaataactatctactaccttgctttgaatcaaaatctctgggcagggggtgttgagataggaaggagttccattcttgctcccagagtttaaggcctactagtctggtagtgagcaaggtttagtgtgggagaaaggttatcatgtgcccctgccccaagaaaaaggctggggcatgagggtggagttgttcttacatcagtgaagctgtagcccctgtctcaacaagctgcattagtctctctatctgtccatgcatccattcatttctttgttctgccagcacggaaggcccccttggtgtcaggctctgtccaatgcagtgaggagctaatgatgagtaagagaggctccttgccttaaagcagctcaaaagacaagcatgcaaacacatcgtgatgttacaatgcaaggggcctatgggagggcacaaagaggggcagctaacaatacatatgggaagcagagcagttttcacaagaggtgactggagagctacctggaaggctaactaggtatgtgttcacctcagggaccaatgaaagggagcggggttggggagccacattcctggcagaggaagccactgcaccaaggaacagaggcctagcacgaggctgaggtagactgtgggcagtgaggtctggcacgaaagggaaggcaggacataaggctggaaggatctgcaagagtcaggccacagagctgagaccacagatttgcactggagaccaatttctctgaagactgtggaggagactctggtgtggtggggaatctgaaggcagctgctccaccagagcagaagatggaggccttccctgaggaaggacaaatcgcagccacagaaggttctgctctgcttgctcctcgaccctccccacatggtccagccttctcctgatgactccaagatgccgctcactgaccagagggtcgcctgggagaggaaagtcactttggagaagttcctacagtgtgtctgcagatatttaaacagcactcttccccaggtttgaacagggaaccagcatctacagctcagtgctgcattgtaggatacctctgacaaggtggaagggaaaaaaaacctggtatgagccaccaaacttgcctggttccgaattaacaactatggaagaaggaatggaaggaaattaaacatcaataaaggcctcttgtgtgccagagcttttagacattatttcaccataaggtaggtgttatagccatttttaaaaacaattatttaatttttatgtgcacatagtaggtgtatatatttatgggatacatgatatgttttgatataggcatgcaatgtgtaataatcacatcatggagaatggaatatccatctcctcaagcattaatcccttgtattacaaacaattcaattatactcttttagttatttttaaatgtacaataaaattattgttgactatagtcaccccattgtactatcaaatactaggccttattcattcattttaactttttttttaaaacccattaaccatctccatctccccactacccctatcatagccacttaaagaagagaagcttgaggctgagagaaatcaaggtcacacaagatttgaactcaactctgcctgactccattgtcggagccatggagctccaaatgaaccctccatccagcaaccctccatccatctccatgctaatgatagtcaggatggggacagtacagtttatatttattgggtaaatactgtgggccagtgattgttctatgcactttttcatattaactcttttcatcctcataacaacactatcaggtagagattgttattgttcccattttaaagatgaggaaactgaggcactaaaaggttaaataacatgcccaagattacacagctagtaagtggtagagattagaaaaaaaaaggaaagtagtagtaggataaggttaaaaaaatatttaagaacaatttacattttattttgaaaacatgataccttccccgaactcatttactaagaaaatttatcttactaaagcataaggacccaaatacaagtccctaaaat[132 bp omitted]ccacctcctgggttcaagcaattctcctgcctcagcctcccaagtagctgggactacaggcgcccgccaccatgtctggctaatttttgtatttttagtagagatggggtttcactatgttggccaggttggtcttgaactcctgacctcatgatctgcctgcctcggcctcctacagtgctgggattacaggcatgagccaccgtgtctggccccctcttttcactcttgatgacttctctgggtgacagcagccaatcccatggctacggtgcccacacagaggtcagtgattacatatgtacagtttggtcttctcttgagctccagacccttatgtctaaccctggacgtttctaccttaataatcttaagtagaacacctcaaactcagcatgctcaagactgaactcattctatccccaaaactgctcctccagtgtttgctgtctctgggattggaaccatcatccatctattacccaagcaagatgctgtcctcctagcctccatctccttcacccccactctaaccaccaatatccaatcaatcgccaaattctaacaattctacctcctaaatatttgtcttattttattctttcttccattctcactatcgctattgtaatacaggccaccatcactgccaaccctatttaccgaaataacctactccctagggtcacttcatcccattcgttctctatattgcagccaaagtggtctaaaatgctaacttgagcacgttactcttctacttgcagctcttacaaggctcctcatagctcctgaaataaagtctgtactcttaaacatagctgaaaaggctctgcctggtctgggccctgcctcatggcttaacattcccatcctatatctcttcccaccttgcgacctatgttccagaaataataacttgtttcatttccctgaacacctttggcacttgctgctctgtccggcatttccctaatcatacattaccccacggtattgtaattgtcggcttacttccctctcttctccagatgatgactgagtctagcctgccccccactgcctgttactttgtgggcactcaatcaatatttgttgattaaatattggaagtctataaccagataattgacgatagttaactatgaagacaagacagagcacacccaaatcctataatggttgctctgggagaggaattagagagggggtagtagagagggactttggtgttttgctttgaatactttgatcagaagataatacatgagatttgagttttgttttttgctgttgtagaagaataaaaaagaacgacagttatttatattttgttccatgtcttttccctccttcccttccaagaagatggcttcaccttctatttccttgccttaggggcatttgccaaaagcaaatgttgtttaaagttctcccttcctggcttttgcagaaaaactgaactcactgaggaagtgtgagtgtcctgaaggcagaagggcctgtggtgaagggaggggtcaaagtctcagaaccaggagggcaggaaggaggtgtctggagccagtgtgaggggcctggagccatgctgagtagtgggaagctgcagcctgtgccccagaagcggtgggtccctggagaaggactgagtactagaccccaggaggctggcccctgggagagatgatgtgcctgcgtggatttcaagggaatgcctgtgtttggacaagaaacatatctgtggtggccagcatggatgaatatcagaggggtcccttggatatcttggttttcataaaactctgggacttttgtgctactctatgaggagaagtgcccttgaaaacaaatgtctatgcagctaatgggataggaccttggtgttagatttgataaaaaaaataaataaataaagtaacatgatctttctagtacaattatatctgtggtatgacaatcatactcattatacttttgtatggcttgactcttttacaatgagagcttttcaaatattctcaaattaaaaacaaataatagccatttgaactaggactcagttcagcacctagcaagaaagacagcattggcattccctgggtataacacaggggctgtctttgcccttcctccaaggaattttcagccaggaagcgggctcttgagaaaacagatgcaaatacatctgtctccttggaatgcaaggtctcctaatcatgaagatgcaaacacgatttctacagtgggccacctgtcccctcagtgacaccaggggagggtcaagagaaatgagcttgcctgatttgagaagggtgtggctgtggagggctcatggaaacttggtgaatttgacttcctcaaaggccaggagttaggacaccactgtctcacaggctgccatgaggggcaaattaagaggcacttgctttcaagcacgagttgggtcattctgactcagaattcagctttgcatacatattttataccccctgtgtaaagacatgtgaactgtccttcggtggtgtgtgttgtatttcatattcctgagtctattctccctgtgtcctccttaacttatttgttctgattttttcccctccctcccaagacagacctagagttcagattctgaccccatcatttacctgtgtgaccttgggcatgttaatctttctgagcctcatattgctcgtctttggaatgggaacaagaatgctttgtgtagacaggagataatggatatcagtgcctagcaaaaagcctgacacttagtaagtgctcacttaatggcagctgtttttattactgcatctataataaagtcccttcttattcctggaagggacaaggccttttctgaacccctcccccgttctttggtaatcaacagtgcttctgaatgccagtgttctgcaaggcgcattctgggacagctcattatccacagtcacttccctcctgttctcagccctccaaaccccactgaacaagctcttccagttctcagcctgcctccttcccatgaaggaagccatgtgatctcattacctcctcacaaagggcatttcagggctcaactgggcctggaacttaatgctggtctccccttatccatggcatctcctcctctttgggtgtgtgcttctgcaagcaattcttcactgtctcctgtttcccaggaactctcctccccacccacccacccaccccctcctgcccccaccaccgacctctgctgcaattgtctcttagttctctgattccacgtacagaccttcaaccaggccttggacaggtaactttactgcttgctacaattttgcctttgtaatcaagaacattggccaggcatcaaaggcatcattctccccatttcctcttttcagattttacaatcatcctttcctgcacaacctccattacctgaacttttatcttaggtaggaggacacaccggcatcataaagtaaagctcctgcagatatgggggtgggaaaaaaacaggttggcctgaagttgcttcttccggatcccggcaccagaataggcccaccactgaggcccagcttggtcaccttgccttgtattgaagggagtcaatgctcacatctacaggttagatcctaatggtgattgttcaggcttagatttgggaacctcaagacctctttcaaaaccttacataaacttgtcactatctctctgagatgactgagtttccacgaatcaagttgggaggctggggaattgtcgagaggagtttctctttattttattttattttactctatttatttttgagatagggtcttgctctgtcacccaagctggagtgcagtggtacagtctcagctcactgcagcctcaacctcctgggctcaagcaatcctcctgcctcagcctcctgaggtgctgggactataggtgtgcctcagcagcctggctaatttttgtattttttgtagagacaaggtttcaccatattgcccaagctggtcttgaactcctgggctcaagtgatcctcctgcctaggcctcccaaagtgctgggattacaagcatgctatctattttttaaaaattattttaccagaaaagtgtattcctgcttcatcgtataattttttaagctacaaaagtaaataatgttggtggggagggagaagcataacctcgggccatctgatgggagtgcacactagcaggggatggatgaagaggcctccatgatttctcacttgattcaggaaacctccttgggggaacaggggtgctggtgagcgaaagagctgacaagatagaactgaaatgatgttccagaatctaataggaagcagggtggcaaaaactgagggaaaaactgagctcactgaaactccagtcgggggctctgcatatcataggcccttagtgtttggtgaaagaatgaataaaacttgatttgaatccagttgccacgtagtttatagaagagatgtaaattgctaacagctgagcctggttcacacccataatggaccttcaaaatttgtcttttacagctgaagaaagcaagactcaagttacagattgcccacctagttaaagttagtcaacctagtcaacacccagttaaaggaggttgaggtcccctaaattcaaccccacactgcctccgggtatgcacgctggggaggcttttctgtggcatggtaagcattaggtgagtactgtaatataatgcctgggatcacagtggaaggcttcagggtccccatttctagaattttcaaacttgaatcattcttaacaagacagaagcaggatctgtctgctccttgtgctctgcctcccagcctcggcttccttcctctcctctacggtttatctcatctcctctcctagccacaacaaaggcagccagacccagacgctgctcagagacactttcccagtgaaaagtccctgttgctttaggatgagaaaggtgtgtcctgaaattagaggtcacagaagctcagacccaagtaatggtcattcagccagactgccattttccttactccttcaccccacattacagacgccattcttcaatttccaaattcacctatcctcatttcagactgtgctggagctccatgatgcaactaggcttctttacatgaaaacggcccccatggtggggttctcctgaccccacactctgcctggcatctttctatggtgattcacaggtcaggagtgcactcgtaagcaaatggaagaaggtaaggagaacaagagctaattatctgagctgcttttgaaataaagtgatatcagagaagaaagtatatttggcactaatcatagacaggagaaaaatcccagccacccaagaagtagaacttttatatcattatattctcacatggaaacagggtttgacctgactcagtcagaatgacctctaactacaaaggtactagaaagctactcatgaagttagaagcaaagaagagggagcccgtcaaatatcattttagttacatcagggatctttagaagcaaggccatgaaatagaataccaagttctgaggcctgtgaagatcaagaccttaaaagataacccagtcatgtgttctggactccttttctccaccaggtgaggaactcagggctcaaccatccaaaaatcatactaattagttctgggaagtcagctgagttctgaccactgtcccaggaaagatctttgtcaccctcactgacctccatcttataaggagtaccactgagcccccttgtttagctaggtcttatccaaagaagtcctctgcagaaaggccgaggtcttgacacagatggcaagtattgctaggggtaatatctaattcccacaggcccaggataaggtctatagaggctttgtctagggcccttctgaggcatggtcttaactcttgccacaacaaagtagttaactgaactctcacacctaacccaatgtgctacttgcaaacagccttgacacagtttgctttattatttgattttgctgttcctgttccagccaagctcacaccagagatggcaggaatctgaaaacctactagaatcagataagtgtttatttttgagtaattatttaagatttcaatgcttaaaaggccaaagactaaagccagacagtccctgtgaaaaacaccaaagaaatgaaacttaaggaaaccagatcatttatttaaatacgccagaggcccatctggactaccggcagagctacttgagcattgctaagtttggtgattgcagtgcaagagtgcgaaatagcttcattaacatggttacttcacacatagtccaggtctttcaggcttagtctcctgctcagaggctgtagggatttcaaggtgtcctgcaaactctgctccatactgctgtcttccacaactggcttgccctggggcttagaagccctttgagggcagatactgtctccaaatgggctggctcaatgaaatcttctatgctcagatttgcattggcacaatgcaagtggggatggaatgaagctatgaagcttgctcggctagtcccagtccccagatcctgggcagtaacacacaatattgtatttacattgcaaagtggcaaaattatggaggatgggtctggggttcaataaagaaaacaataaaggatcataggggtagttgtactcagaaataacatcaggaggaaaaggacaaaattattcaagccaccagccaactcagatgcccagagtctctcctcagaagccattggggggttgacattaggccaagaaggcttctgttcagaagaggcaacagccaggaagggcttgtgttggagatagcccaagggctccagcctgactgctgacagccctttgaccacagctctgaatctttgtccatgcggtggccctagggaagaggcctgctttggggggactgtttaatgatttgccagcaaagaacaaggcaaacagactgctggcagctgcctagatgcaacaggagagtggatttttattcccacccacagtgtagccttccaggcaggggataaaagaaaaagtgagatggctctgggagagcctgggagggattgccatttggggctcagaatttcactgggtctctatggatggtgcctgtatatctcagcattggtgccagctggtatttccatcctctgaatattttagaaattcccaatagtagcatctcttgcgctcctaggaactaaaaagtaagatatataaatagccttttatggcagaattctaggcattaaagagaatgaaagcagaaaaacactgtcttagctcctaagaagtcttttacagaaaacatatgatgggaaaatagcttggttctctgccaaattatttttcctttctcttcccatggacgtttccctatttccttggttctatagagaaaaaaaatggcacctctcctatccccctgtgatccaaagactgtgagaactccaatcctatagctctctacctctttttgcccttgactccccatgccagttcaaattgggcccttctccaatcctttgaccagccctcagtccccagaaactaaatactttccctcatatattcccctgaagccatctatacaaaattcttaaatgacacttacctcttactgtgggtcaatgctgcattgtgacccactctcttacctatttcctccagcagaatgcctgattcttagtgcaataaaacattagttctttcctccttcctgcaaagtagaatctgagctccttgaggtcagggactaggtcttattcatcacttaacatcatgccatgcacacagtagatattaagaaaaatgcatgttgaatcatctgttttaataaacagatgtgaggtaaaatatatttggtggttgctctgtcattttatcaggatatgattattttcagatttctgctttctcttcagaaactttctgtatactccctgtaagtttcagtttcaaagtcagctttagagtatcttgacctcatcacaaggcagagttctcttctttcctgttcaccatcatgcctagatctcctccacaaccctgaacaaaactcacttctttctggagaagcttcctgtttaataacccatcccgttatgcttttattgtctcctctcagtatcagtgtactgctgagttatgcataaccctgaatggggaagaaagcaacagccttctgccccaaaggaacgagtcccggtctcaggagagtaacacctgcctgtaggctacagcagtgtatacacgtgctcaatgcacagggtcttaaggccatttgttagacaacacacagggcatgggaatgcacagagcacagcacataaacactggggtaatgtggaatgatggactaacttgctcttgctgtatggctttgaagtactctcttgtcattttgggcccttcagtctctctcccagatttgttaagttattttttgagagaagccatttagagactattacaaacaattaaaaaaaatccctgcagtattgacagaaagaaactcttgctccccactggcttcaggccatagtgtcagctgtctgcagtgaacttcagtccctaccaaaattttatgaggacttggcccagagatctgcacagaaaagttctgggaaagcttagaatcagttcactctggataatattccatattttttctgagtgggtttttcttacctttggtgggatgagagatgaattacatttttcccccgtcctttattatttgaaaagaggatgtatctgaagcccaagtttttttgtttgtttttctttgtttttgagacagagtctcactctgtcacccaggctagagtgtggtggtgtaatcatagctcactggtgcctcgacctcccaggcccaaacctgggaggatcatacctcagcaacccccaagtggctgggactacaggagcacaccaccaagcctggttaatgtttttaatttctatttttggtaaagacagggtctccctgtgttgcccaggctggtttctaaatcctggcctcaagcaatcctcctgcctcagcctcccaaagggctaggattataagcatgagccactgcacccagctgaagcccaagtttttttgttttttgcattttggtgtttttttcttttttctgttgcccaggctggagtgcaatggcgtgatctcggctcactgcaacctccgcctcccgcgttcaagcgattctccagcctcagcctcctgagtagctgggattacaggcatgtgccaccatgcctggctaatttttgtacttttagtagagatggggtttccccatgttggtcaggctggtctcgaactcctgacctcaagtgatctacccgacttgacctcccaaagtgctgggattacaggtgtgagctactgcgcccagctaaagcccaagttttaaagtcttcagttgaagagacatttgattccaccaccctgcctttgcttcagcttcccggcagcttgatcagctctccagcctatcctgcccctgagaatgtatgtaggccacctcatgccaaaggcagttgtatgttcaaatattccagacatcctttgacttgctctttgtgaactatgagctctttgttacttcttaattgttcaaacctctttatttttcttgctaagcgcaaatagtaagagacacaaaaagataatcaaaggctgataaatgagagaggaatcttctcagttatcaagttggctctgatgaataggagttcctgttcgcatttgtcaggagattcagggaggtgccatcaccacactgagtgggtaagggaagtacttagagagttagggaggggagccaaattcctgggttgagagttcacagggcaatgaggatcaatagcagcacttttgatttgtacactgttatcaaggtacaaagcaacactaccctttgtcctttttatttttactctgctaatggaacccttcaccctaaattaagattattattcagctttgatgttgcattttatattagcaaagtgctttataatccttcattagctattttactctccctttattagtaccacccgttccacaaattaggtaactaaggcttgaagagacaatgcaatgcatattgggcttgtgacctggcttctgggcatcggtttcaggtactaaatctaatgaagggagacttgacagaccacaggaagaagcacagagtaaaagggcagaagcacggacataacaagagctttcttgggaactaaacctccaatgacatagagaaatacttcaaaatgttgctttcttttgctggcagtaaaattgagagctctcattagcttaaatgaaaaatgtgactaccaaacacatctttaacaggaaaacagttttcttgattgctgaatttcctccctaacagagttgaaatagaaaaatgaatgtgtttgaacttaatggtgtcagttgtttcctaagaaagggactgatgctacagcaagacaaacagccctaaattacttctgacccaataaatacgcgcttcttgactcttcacgtgttgctcatgacataatactattctagttcttccacttctctgattgtcctcacttgttgcctcttcctcttacttttcttcctcttcttcttgtttaaatatgtatgtttcctaaagatgtactctctgatctctattacctctcttctgaggttcttattcactccagtatctttaattatgatttccaaattggtctctgaagtcaaatcttctatacttcaaaatgcttgttagactttatttatttgaagtcctactgatatctcaaacttaaatataccaaacctaaatatcatattctccctgcactccaccctaagccaataacctctcttaacttaacctatttcagttaacggcaccaccattttcctagagactctggctgagcaaagactatgccatcacttgtctttggagacctatcttttctatgtctctggagttggaaccattacagcagacttctaactagtctttagtctttcaccattctaaagctctctgtcatttcaagaacaatcttcctagacacagcactgatcctatcattgccctgttcaaatactatcagtggctgtccactgtcttctgaattaaattcaaactccatagcctatcaaatcaaggcctcggtgctctgtactggttttggaatcagataagttggttttaaatttcaactcggttttgcatttcaactctatctcttccaagctgtgggtaacctaatctctctaagtctcgttttaaaaatggaggctgggcatggtggctcatgcttgtaatcccataactttgggaggccaaaatgggtgaattacttgagttcacaagttcaagaccagcctgggaaacatagcaagaccccatctctatgaaaaattttttaaaaattagctgggcacactagcacatgtctgtaatcccagctactcaggaggttgaggctgcaggattgcttgagcccaggaggttgaggctacagcgagctatgactgtgccactgcactccagcctgtgcaagaccttgtccctaaaaaaacaaaaaacgaaaaaacaacaacaaaaaacaccatgcagccgggcgtggtggctcatgcctgtaatcccagcactttgggaggccaaggtgggaggatcacaaggttaggagttcgagaccagcctggccaatatggtgaaaccctgtctctactaaaaatacaaaaattagccgggcttggtggtacgcgctggtagtcccagctacttgggaggctgaggcaggagaatcgcttgaccccaagaagtggagggttgcagtgagctgagattgtgccactgcactccagcctgggcaacagagagagactctgtaaaaaaacaaaacaaaacaaacaacaacaccgtgcaagaagatcattgcggagataaaatgaagtaacatatttaaagtaccagcagttcctgcacatagtaatcactcaaaagtatgtgtttcttcccttctcctctaccttttcagtttcatccccacctcttcaatgtaccatactacttgtccaaaataaattggattactcactattctctcacattctcttggaatgcctattatttctgttctgtgacttattaaaatcctatatatccttcaagggcaagttcatatgctacctcttccatgaagaatctcttcttcttcatctgaaatgccccaaatatctcgtttgtatctatgtgtggtaattttcaccttttgctttatattcttttttttttaataaacagagatggggtcttgctatgttgcccagactggtctcaaacttctggcctcaagtgatcttcctgccttggcctcccaaagtgctgagattacaggtgtgagccaccatgcctggcctatactctcacttactaaattgagggcaggggtttctttataatcccgcatagcacaatgctctaacataaaaggcagtcaataaatgtgtgctaaattaatgttgaaaacgtgagcttttggtctcccaggtccactttggtccatttctttgtgattcgtacttcacactaagcactcgttagaaacaacctctggagggatatcagaatttcaaacaatgttaacagagaagctgagtcagtctgggattaagttcagtcctagttcagccaaaaggaattgtctggaccctgttcctgcttgaggagatatcataattgggcagcttgtgtgagccatgggaacacacttgaatacatttacatgagaacatatttgtcttagaaataggtacgccaaagtgcatgacacctggctgggtgcggtggctcacacctgtaatcccagcactttgggggaccgaggcaggcagatcacttgaggtcagaagttcgagaccagcctggccaacatggtgaaaccccatctctactaaaaatacaaaaattagccgggcatggtggcaggtgcctgtaatcccaggtactcaagaggctgaggcaggagaatcaggagaatcgcttgaacctgggaggcagaggttgcagtgagccaagactgtgccactgctctccagcctgggcgacagagagagactccatcttcaaaaaaaaaacaaaaaaacaaagtgcaggacacctataaaagtcaactactattagattgacaatgacaatggcttcactgaaaacaaaagcagatccaaaaagttccgaatagttctgaatatggctcagctaagatataactatcttactctggctttcatccaatacatttcctcttggcccagttagcaaatgggtaattatatgacatcagccaccatggggtggctgggacataaggtggcttcatggtgccatataatgtggcaccaagtttcttaatcaccaaccacaggtgcatcaactcttccccccaccacacacaccccctccataaaaccaccttatctgatatttctgttgacacagtgactatgcttcaggcactttcctttgcttcttcttaatgtttgttcgggtgggtacctctgtgcagatgcctataaatgagttcttagggtataggagtaaccacccagtcatcaggccatacttttgtttttaggcaggcttaactcagaaagtagcagcatatgtaattgctaagccaaaacctacctgaaatacttcagaggctaagcccctttcctagccaaatacctaactactagagttgctctctgtcagtaagttgattccttgcctgcacattatcagacctgtttctggagccatctttctccctaaaatgacagctgctacagtttcccccaaaccctttgtgacacggcatatcaatggctcccaagtgatccttgtcaagaaacagagactcacttcatgtgaccactgagtacaatgctggatgggcatgcacagagatttccctcacaggtacatcagaatgggtctgaaatatggcctcttacttggcaagtatttgatgagcacctatcttcttcccaaaactgttaggtccaacccaggaggtacattctcactggggagatgacatatacacaaagtaaatggtggtacaaaacgacattgtatcaaaggccacattgtgtggtaaagccaataggtcctacaggatttgtcaaggagatggatcttaagctcacccttaaagacaacagaatttggacaggaaaaaaatagccacaggatctagtccactgggatctgtcaaatggatttttcaaacttctgagcttacttgagaagaaaccaggagccaggtgagagaaaaagtaaggttcttgagcagtttctctcaagtcttcagggtacaggaagacttgtctgactgaaaaaatagatctgcaaagatagcttggatagctgaggtaggatcaaattacaaaggctactgcatgccaagatgagagttagagcttgctctcatatgcaaaaaaggaatcatcctaaattcttcaggggatctcattatcaaaacaatactgtaagcagagcaatttaatagcagagtaaactagtgcaatgaagagaaaactagtggtaggaaaatcaattagagagctgttccagtaatctagtactgcacgatcagagcttgaactctggtagtaatagttaaaaggagaaggaattaattacagaaattatgaaggaagtgttgaaagtacttgacagattggagtaccaggatgaaggaaatggaggagttaaaagttctaaacttggagaattggaaaaaagatgttgcattaacaaaatggggaaattagaaaaaagctagagtagggaaaatttaagtcagtcttgatatactaaatgagagatgaacatttaaatcttaaaggtagtttgaaataggaattggagtttgagtgacaagccttctgaaactgattctgatatatgctaaaatttgctaaccgttgatcaacagggaccaaaacaattctaggcagtttccttactacatgtagaatgaaaaccaccagagtgggaggccaatatgcaaaactggtcatttcccaaaagatagactccatgttcaggtagaagaacaggggcttcttccattatttccccataatattaaatttacatatcacttcagtattaaccagggcattgaattgagtggatctgaaacatctgcagaagcttcaaagctttcttgtatcttataaattctgtatttctacaattctactacataaatatgatctaacacatgctttcaaataactactgtcctgtgtaccattgaacaaacaacaatgctggacaaaatggtaacaaaacttgatttagtttgctttagtgcttcaattcttctaaaggacctaatttctttttaagattgaactactgctttttccatggaagaaagtattactcgtcttagatgaaagaaaggatacactgcttatctctgcagttggtaaatcagaagcagagcacatgacggggtgcagggcagcatgtcctcatcctcaagctctgcactcttttattttatccatgctcctccaaagctacattcagaatcagcaaagaaaatgtggaaggtgggaacgagacaaaccccaaatccagaatatgtaaagggaatgaaatggtgccccgaaagctgagcaaaatggaatacaaaacaaagaaaacagaaggcatgagatcagagctttctaactaataagttataagggccccagtcaagttatataaggtagatcctttttttaaaaaaaattttctagaagaatgtcacgtggccctatcatttttctttagttgaagaaagtgaggcaaatgttaagatattgttttctagagcaaaagagtctagctgctttacacttgggattctggtgtaaagagtaaaacctgcaacttcgatgctcaccttgaataccagtgagtgtaggattttatttcacctgctacttaaaacctgtggcctaatctacactgtttcagtaacagtagccttaaaactatatgaacatctttagaaatagtaatcagaaaagggtcttctgaaattaagatgcttacaatcagttgtacttggttttcctgcaccatcctttgataccagcatactcaaattctagctcctcagctaaattctaaaagaggtttaatgatcccgtttactaagtgcctagaatactcaatattgcttagcgaaagtagcaatttaatgaaaaaggcaaaagaaaatggatgagaaacatgaaagaaaagcaaattttaaacaaaggactgaaactttttgtttttcacagaatgaagtttccctgatcactcttctccacactgctgttctttctcattgtaaactcccatagaaactcactgtatatcttatttagcacttattataaattctcaaggtagagttctctagtacatatctacagtatctgaagggctccgttagtaagcaccttgagggcaggaatgtttgttatcttatgctccttcaggccctctccagggcccagcattgtgccttgcaccagggtttagtaatactgagtaattgtgaagccaaccggagatatggagtacactgaggaccaaacttagaaagattgtgaagcagtgggacaaataaaaagggtgagggatgagccttcagacatgagtgtgtgctggaaaattgagctgaaaaattaaatttctaattccagataattcctttgccattgtttattcctggtcagggatcccacctctccaccactacccccattccacaccgcccaacacatttttttccttccagcatcagccaggtgcagaacaaaaggaaattaacgatttagttattgctccaatgctgaaagtttgaaagtcagtcatttggagcaggttccattgtgtgtccctgcatgtcttgggctttggtggctgtgcacagagtaccatggctccagtcaccacagtgggggccaacgctggacgccctggcttctgagcaagagagatgaaaggcttcttctaatgtaataactgacggcctctcagtgtcgtttgaactgtttacaggctgagttaacgattacaggcaatgtgtatcttggccaggtgcccgaaattcttacccacccgtcagatattatcaaagagcccttccatgcctggctggagtccttccaaagcacctcatagagatgccgacacaaaaggaggagtgttcagaatgtgctctctgtctctccagaggccaagcaagaaagtcagaggatcagcatgaattaggtgctggggacactgagtttccaggaccactcaggactggggagagggtcaaggtcagtactggggccaggagaaccagattccttttgaagcagtttaggaggtgtatgtaagagtctttgcagctggtagctaaaggatgggggtagaaaaacgaccctcaagatgaaacagaaatctacaccacataatagagcaagcagcccctaagacagtggatctggaagaatggactaattattatggggcagttatcagaggagggaggaaagtatattttccccccacgggatatgcacacaatttgtaaaagaatatcatcttaaggacaggacagagcaggatagagtaggaaacttcaaaaataatagtggataaagtagggagagctaagaaaatacctctttattggggtgaatcccaagagactaaatggcatctgtttaggaactatcaaaatgttttttgcacaaatacatacttcatattaatcatgagatataatgggaagccagctagtttatgaccaaaaaatgaacttatcatcaaataatgctggaaaagcttaggaaaatagtcatttttacttcttatttattaagtacctattgacctctggaatacatatggaagggaaataaatggcagtccctacaactaagatgtataaatctaaagtcaatatgtaagacagttacacactcattccaaaactactatcactacaacgattctctcaaaggggaatatctgtcttcaaaatctagacagggggttatatggcttctttatctccatacacagcctaatgtagaggacagcatataacttagcacaaaatgctctcacaagaaactttggcaacaatggatgtcattcatgctcttttatccatatgtgaatataataatcattattaccttgtgtttccttgaagcttcacttggatatggttgtttcattctcttgtcctaacttgctggttaatgttgctattatggagcagctggtgacccaccctgtgtagtggggcataggccctggtgttaaaagactcttctttgggttatctaccttgaggaggagatacatttgacattacaggtgacccttaaacaacacaggtttgaactgcgtggattgtcttctgcctctgacacccctgaaacggtaagaacaacccctcatcttcctccttaacctagtaaggtgaagacaaggaggatgaagacctttatgatgatccactttcacttaatgaatagtaaatacattttcttgggccaggcacggtgacttatgcctgtaatcccagcacttttggaggccaaggtgggtggatcacctgaggtcaggagttcgagaccagcctaatcaaaatggtgaaaccccatctctactaaaaatacaaaaattagccagtatggtggcagatgcctgtagtcccagctacttggaacgctgaggcaggagaatcacttgaacacaggaggcagaggttgcactgagccaagatggtgccactgcaccccagcctgggcatccagagcaaaactccatctcaaaaaaaaaattctcttatgattttcttagtaatattttcttttttctaacttacattattgtaacacagtatatgatacacataacatgcaaaatatgttagtctactgttattagtaaggattctagtcaacagtaggctaggttttgggggtatcatatgttatatgcagatttttgacgtgcaggaagtcagtgccccaatccctgtgttgttcaatagtcaactgtactattttgattacaatgtaggtcaagaaattgattaatttaatgtttgcgcttcattgtaatactttctacaacagatcataactcatgtg[260 bp omitted]gcttgcagtgagctgagattgcgccactgcactccagcctgggcaacagagcgaaactccgtctccaaaagaaacagaattggatgtggttgggttgtttcagagaagcactcccaacattccctagactcctctctactggggatacccttctctcttgaggaaagacaagagttcagtttgatttttagaacacaattagaaatcttggttgcaatgaaatgaaagaaagaatgtgagtcagtggtaagtttgaaaggtaaaactacaaaaggaaaccctatccattgacggtgaattttagaagaaatttcagagaatctcttagaatgtggccgcatgctcttatagaaaatagccttaaaaaaagaagagaacatgtcttcggcttatctatgacttgatatcaaatagaataatgaagaaaagtaaagcattgagtattatgtaaatgaagagaaataatttagaaagttattagagaaacagaagaaatcaagtaaagtaagaacttaggtatcactgcacttctgaaatatgcagaaaccagatagttgaacaatcctcacacagcgtgggtgagagtacacctggagcacttcctatcctatgcttagaggtcttactttgtaaaagaggttaacagacaagaagttcaaagcaggccaacaaaagggtagaaggacttgaggagatgattcacagggaagggcaagggccacctagatgaatacttccaagaataacaacaggaagtgtacctgcaatagttacctctccagtaactgggctgctccagatgcattggctccattgaaacaccagacaaagaccagctgtgtctttgaactttaggacttttggggtgggtgggaaatagccctctttcatcctcccaactgctgttactttcagggttgtgaaaatctatggaggcacaatggttcagctattccaccttatccagagagttgaaactccaccacagagctctccaaagtggcacatggtgctgtgcaggcaagtatatcgagaggaaaacaaagctccttatcggtttgctgtataataagtctgtttggacagattgacagtatatggaaaatggataagaaacactgatttccttcctcacaagatactactacaacctctttctgccttcagtacctagcaaaactagcaaatattaaacaggatctgaaattcctttgggaaaaaaatataaggcaatgactttgagacagccaaatagtctgtcatagcatgtcttacttatccaaagataatggaaagatgattgtcaatacaaggcaatataatgtgatgttaagttccctagctttaaatgtatatacaactcaactatttctgatcagagatctggttccatagtcagatgcatccaaatccactaccacagcaacagctatgaaattaccccttacccctttatgagggacagtttattattgtgtacacttgaactcctagaaataaatagtcacagttccctgtgactaataagtaattatattattatggcaatttaatcagaaagctatagaacacaaaaatctgagaaatattcttttggaagaaagatcatgtaacttagtccctcactataaagatcaggtgttaaactaaataaaaaagagcagacttgttttgcagcttgacaaaaagaaaggtggtttctctagctaaaagtctgtagatgatgcaggaactgctgcttagaaactactttctaaacaaactgcaaagggatgactataaacattttatcaacatattacaataaaatcctctaagaagctgcctcactattaaggatagagaaaaatcacagatgctgtgatttcagttcttctctttcattttctgtattttggaattgtctctaaaatctaagccttcatttgacagggaggggtaaaaggatctttttctgatgggaagacacaaccgttaggatgtagcctggcatgcatttccattgcctgttaatgtagcctgcagaaaactgtctccagaggaacaacagcagcaatacaccaacttattcaacaaaatgatggttattttatcacatttattgaaatgtagacagtgaacccagtatagcatatgacataggagggaacaggcctgctcatcaaaatcccaacctaaaaaagaccaacgtgatatggaggatacagaaatgataacaactgttgatagaagaaacgtttgacttgacagtgggcatggattttcaaatcacccaaaaatgaaaataagagacaaaaaacagaaggaccaccatgtagattaaaattcttaaggggcaagatagtcaacacaactgaggagagatgagcacgcaaccatttaacaggaaaaaaactcagatcccacatgctgaaacagataagccttagacaaggctgaaacagagggaaagaagtcagtctgtgaggaggtcagatttaactgttttctactaagtacaattaactaaaataatgagtggaagaggggacttgagggggaaaaaacagagcgggtactgtcctaaggttatccattttacatgtaaccatgctctcaacaggcaaaatttcaaaggccagatatttaatttggcttcagggtctccaaagggagctatttttagagactggtctgaggtttgcttagagttagtagcttcctctaaaggattgaaaataaggatttagaatattctctctatagaatatatacaatatggaatatgtatatatgtatggaatacatctatacaatatatagacataatcattctaacctaaacattttttatcctttatatatacacacacacactaccatagtagttgcttttgtataaaatcaaatatgatgctaatttcaaataattctctgtcactggttggtatgacatacacaatcttcaacttcaatttccttcagaacttgttgagttcctttggttctgatggaaagattcagggctttgattttctagcttacctttatttgatgacagctaagcttagaaataaaaaaaaaaaaaactccgtgtgtgtaggaatacagaaatcagggtagagattgaaagaaaagaaaaccactgaaaacctagagggggaaaaataaatgtatgtgtacaagcaaactttattacaggatattcatttaaaatgtgaaacaattcatcaactaggattatgaagaatgtgccattttttatgaaacacagcaatcccacaaactcaaaagaaaagaccaaaaacatgaaaagaaaagagataattctacctaattctcaaatacaactaccaattatggaacagaatattctgattagcacaagtcgctaataataaaagtttttggccaggcatggtggctcatgcctgtaatcccagcactttgggaggctgaggcgggaggaccacctgaggtcaggagttccagaccagccaggccaacatggtgaaaccctgtctctactaaaaaaatacaaaaattagctgggcatggtggcaggcacctgtaatgccaactactcaggaggctgaggcaggagaatcacttgaatctgggaggcagaggttacagtgagccgagattgcaccattgcattccagcctgggtgacaacagtgaaactccgtctcaaaaaaaaaaaaaaaagtttgtgatgagaaaagaaaatagcttttatatgaagaatgcaagtccttttaattatcaggcccagagagacattaaaatgagaccgcagtcaagtcctactccccgctttaggctatgttattcatctcttgaaactgcttgctattgccacaaatagctataaattaatctaataatgccacaccagacactataacccataccctgtagcttaaaaatgtatagccaattactaatcaatgttatttctgtaaaccaatgagaatttctgacaaacaactttgtatcagcccactccctatccctcttttttgcttttaaaaatccacttgtaactgctgctaatcagagtgtatattcagggcaacttgaatctaggctctggggttgcaatccttaaacttggctcaaataagctctccacttatattaattttgcctcagcttcttccttttaggttgacagtgatttatttacctttctgaagaccaggaagtccttaaaaattcaatctgtactgttgaaatcctttcttcaatgtattggtgcactttcctgcctaaatacatcatgttgaatgaaagttagcctttacttggtgtctacactacaaggatatcattatggtcatttttggcatgaaataatataagagactgggctaaacttacaatctccctgggaagttcttatttgctttttaggtccattacatctgcttcttttttgatatatctctggttaataagcatagcagagaaaaaattccagttaatttattatttatttaatgaaaagtatcctatagaactttggttctggggtaaggtacagaataggaagtaaaaattcaagtgaccagatattaaattaaccttgccaccaatattgccaaactggaacaacagggtatctaaagacaaaacacattttcagaaattccacccatagaaatggagtctagcaatcattcattcttagcactgtattgctcagtatctcaagactttgtccaatagcctcaataaatgtataaagatatcaagaagtaaaggtcaaaaaaggaaccgtgaacatcaaacaaggccactggaagtgacccaaaacatcacatgctgggctttcctttttaatgataataacagtgatagtgaatgtttatccttgtctttctttcaaagagcttctaaatctttgcagacatctcttactaatctttattaggctttgggaagaaaacagttttccccaagaagtgccttcggagaagaaggaggcttcccaaaaccaataaaaaggaaaatgtttgcccttctccaggtcctccccacgccccactggtctcctaactcccactgtgttgtactggtgattgaaatgaattataataccatgcaagtgttgaaaggataataatggtaattcagtttgtttccaaaagagttataagccatgtgtgtttaatcataacagggaacaggtaagtagaaaagatgaggaaacccataattacctttatcccattatttacttattttgggaagagacttcaaattggtaaagttacaaaacactgaacacagatttttttatactgcagactgttggtctctgagaaggctcaaaggatggtctttacctgaaaattttttcagggagacaaatatttgatagatgctatgacaaaaactctgcttattcttactttgatccaattcttctcagatagggaactgagagtcttagagacttgcgggataatttccaagcaggctatagaatcgtatctgctgagtttcagaaaacatgttgggaccagcacagtataatgaactggggaaagtagtccccttcacaatcctgaactccttcccttctggtccttagaaacatggctgcaagctacacaccagaagctgaagcgccagcattctgagcaactgtcccagagtagcagcaattttttttttttttttgagacaaagtctcactctgtcacccaggctggagtgcagtggtgccatctcagctcactgcaacctccacctcccaggttcaagtgattctcctgcctcagcctcccaagtagctgggattacagttgcgtaccaccacgcctggctaatttttgtatttttagtagagactgggtttcaccatgctgttcagactggtcttgaactcctgacttcatgatccacccgcctcagcctcccaaagtactaggattacaggcgtgagccaccgcacccagccaatagcagcaatttaaaaaaatactctaaattttcaaaaagggaagatggaagagtgatatataatgtggttctaggatccctcagactctgataagtcaaaacttagaaaacagctgctttgtgtcagtgatcacctcattgatcatggaaggaagctaatggggttaccagtacggaacaggcacacatacaaaggtccagggcagataagtgattcaccgtaccacaagtaacaggtattaagttcccaccccagaactcacatactattagtcattctttaaaccactaaggctacctgtactacattatggtaatatttaatcagcacccttaacccacaaaattttgaagctaaagccttgtcctttcggctacattaaaaatacaaacagtcttgcttagttatgttaagctgatgccaaattgaacgcaaataggttaacggagtctaaatcaataaccttcacacttagtaatatttctgatagtaattaggtgaataaggaatagctcaagtttaattactattaataataatacctaacatttgccattttcaaaggcaacactcatacattatttcatttcaggtagttaggccatttattactattattcccattttactcaggaagccacaagctcaaagaggttaagcaatttttctttacgtcataaagctaagaaggatcagcactgagattaaaatacaagtctactgagagcacttttcactgtaggatgtcgctcctcattttagaataccttttatgccttattatcatattatatcattatatatgaatcctgtgcaaagagcaccatttggtgggcatattatcttaattatttgattggtgatagaaattatgttcttaggccagaaggcatccagttatacataagttagaagataatgaagtaactctgccctgagggaacccaagaaacactctgatattcaaaaggaaagaagttctcatctaggatgtcagactgcctacaaaacaactgcctaatcacagagcattcaactggtgaccatagggtaacctacatttctgggaaaaggaaaaagcaacaggcagaaatggtagtttctcaccttaggaactttgcatggtggtctgacttcagagatatgttcctgatctattttggggagaacatactttccttcatgctcactagatgcagcactggacaggtaattttcaaataataattaccaaatgattcatgcttattaatagatcctcatgaaagtcttgaaaaccaggtaaaccagaaagttacttctcctccatttgataaattaaataatcgttgaatgtcatgccaaagactattttacaagtcatctggagaactagtggtactagtcctcctgatattggaacatccatgtgtttgggtatgcacccactgtttgggtgccaagccctcgtttctgtgtagagtttagctacaagagaaaatcagatcttctggcaacacttacgaggcaggtgcagtcataaagaacttgacttttgattccattgtctctgccaggacaggtggtatggtagaagtatggaatcttgccagacaggctctaactcaaacctccctttagaaaacaaaacaataaaaatggaaacaaaatgccaaatcctattccataccctgaagattgacattgcttgaaaaagtaggacattttatataatacattcatttgttttaagcttacatcaactcaggagaaataagactatgaaaatgaaaggtcagttgcaggctgggctctctccttataaattcaattccctattcccctgtataaactaaagggacactttcatttcagtgaattttatccatatattcctagcataaaaaaaaaaaaaaaacctataatctaatacctgcataggagtaacacagacaagttagcactgctgagtagaataaaaacctttggcaaatcctacttacttcccagatcctaccttaccttcctaacacaaactagcacatctcaaatttttgagaatggtcagttgatgattccatgaaagagacggtctttctctaaaaaactacagcatgtttgttcagaaccaagtaaaaacaaaaggattgtttctagtggcaaagatagacaattgattatttttaccaggtttgtctccagggcaagtctttgtgattgatgatgtgtctcctgaccacaaggacaccacaagaaggctcagaggaagagtgctcaaaggatccctgtgagggcactgttagctgtcaccattggaaatactgaacatttctggtgttcctggaatctatttctaaccactactctgtggttgtgatgaagggataggaagagattggaaatcttctagagcaaatgctctcttcagttcataaccacagaaccaagataaaataacaagaatgtactttgcccaaggcataattctgcctaaatttgccctatccatcatttttttcccctaattcttgtttatgttgttgttaatctgctcaaggaaggaaagctagataatctacaaacaggttccggaaaggcttggaaaatttgtggattcagagaaggatatttaagagggagccaaaatctctgagaacaatgccctataaatgccccaaagtgtaagaaccaaaatattcaatgaatcattgttcttacccagaagataatttcttaaagttatagtcttaattttcttcaaatgataaattgtctattcaggtcccagagatgaggctgtgacactaatacttaacatggtggttgtgtctctttatgcctgactcaatcagttgaaatccaaaagtaagttcttccttgatttacctgccaagacctgagttcaggccctcagggtgctgaggttttcctttgtgggagaaaatgacatcatcaacacctcagcaacagtagaggaatgcagggaatgtggctcccaacatttggtgatatcaactgtcctgggagaaaccccaaactcccaagagtcaaacattggtttaaaaaaggagtttttttggggtgggggggtaggttgttgtttcgagtttattagtagtgtttgatgtttccaaacaccagttttaaaagggaagatgggttgggggacctcttccagtaagcgtgtacctcaagaaccaaacatacatgaattaagtccagataaggcaattcaactcatttgtatcttactgaggcacatccaaccaaggaagaatagagacttagttatattaggctctctcccagctctgagatgagtatattctttgggggacttgctaatgttgcaagtttgcattcaaaataaattctaggcactcacataatcccccagtctcctccaaactttctttgatgtccaacaactaaggacaaggatctttgattataaaacaatttctttggttggaagaaaattctttgcagggcgtgaacagcaggagaaagaaaaggtttttctgaagtgcaaactagttggaaaccccctggggaaagaatctgattcccagtctttgagaggaacaggcctgcctgtacaagttgcctctgctgaaggcctctaagaaggcgcttttgtgtctactgtatggccctcagcaacagcacggcggcccttctctttttttttgccagcggaagttttccaactctgggaatacacaatgcagaaagtcacggtttaataacaaggcatagttactaatcagatggccccatttccactcttcccagttgcctccagatgcttacatactagagctctatccccctcaccccatgggtgaacacccaccagctgctctgaaatcttatttttagtataagtattcagcttatctctaataattcacttcacagagtacttaggatcagaagcatcctactccttttactttcatccagactggttctaggttgtctctggctctttcaggtttttccaaaggttagattcacttaggtgcaggttagtgattgaagtcagtgtgctctgatcattgggacaaccttgacgaagcatttacaataagggtcctcaatctactacagatattttaaaatatgaaactccagagaaaggctccttttttgagtgtgttaactggaatgcaaagacagtacaggaccagaagactgggagtacaactgagtctcatgcttagttctgctacctatttattgtaagacattaatttagtcagatttttttctatcacctaccaaacaaattttgtctttgatgtccaacaactaaggacaaagaaaaagaactaaataggcaagatacatgtccctttaatatatgaaatctatttctagaataagcataaactctaaaagtttagagctggaaaggatcttaaagattatttagttctcccccaactctacaccaacagatgaaagattaagtgacttgcttttacttaaaatgatcataaggtgcctagggacttttcatataccccaagggggcaactcagtaatcccaaatactcaccaatgataatttttaaatgtttaatgtatgtcatagagtttactaactttagagtaaaataacctaatgtcacagtggatcggtacattcttcttaaatggttctctatatgcctcatatcatactaaaatcaacacattttagggaacaggaataacacacatttatgactaaagtcaataataagaaaatggtactagaaacaatttttgctaaatagatatgatattcaaatactcttcaccttctacataaaaggtcttagtatttatttcttcccttatggaatgcagtttgcgaagaattaaaatcaagctagttgagataaattcaaacaaaacttccaatatgttgaattctgtttaaagctaaatttactgttttaactaaaatttaacagggactgattggtacattttagaaagtcagtttacaatctgaaaaaaaaaagccatggtatctagtcattctagactcctaaagaaaatgctaaagatgagtattaaacacacaggaatataacaacctgtaatta[137 bp omitted]agctccacctcccgggttcatgccattctcctgcctc[227 bp omitted]gttaaaatttaatattttttcatttgttttttctttaatcatagggaatctgagacagaattaccacagtcatttgaatgactcttgaaaaaatgaaaatcagcactttaggccaggaatggtagctcatgcctgtaatcccagagctttgggaggcagaagtgggaggatggcttgagcccaggagttcaaggttatagtaagctctgatggtgccactgcactccagcctgggtgacagagagaggtgacagagagagagaccctgtctctaatgacagaaagaaagaaagaaagaaagaaagaaagaaagaaagaaagaaagaaagaaagaaagaaagaaaaagagaaaataaataaatcagcactctaatgcatttatgcctacacctacatctggcattcaatacataatgcctcctgctgtttaagttgattctcctcagttggacaaggctaaggtgttgtgttgctctttgaattactatagtatctgtcacagaatttggtacaaataggaaaaccacattataaggcatctagagaatccagtgccccttctagtcttggtaagattcttagcctagactttataaagaggtgatattgctctgagaagatccaggactacagaccacctgatgtgcagtgattctgtggcagaataaatgacacatgcaccacgtaaagtattgctaaactgtggtgaggtatttttggtctgttcacttattttaaagtatgcctgtagttgactagggatcaaagaggaaagagaccctgcggcagtctatatcttcttaatggaatgttcagggggaaatctctgctgacatgtgctttttaatttccctgcagtgaccccaaaaggtttataataaataaataaactatgctaaaaatattggccagtaagatatagcagcagattggaattctttgataagcactaatctgagttcaattcttcatatataaaatgagaagactggactgattgttttttctagcttgaaatttgatgattatatttcacaaatggaatattctgccacttttccctcccctccatcaaaactgtattttactctaagaatggaaaactgaataggacttaattccaatatagagccaatacagtccttcagaagttaaagaaacttgaccacaagaattttaaagtcagatcatcaatataattccaggtagaagatattaaaatgagggaacacaaagcctagatcatataaaagatgttttttgttgttttaaagtagataatacaaaagactgtagaaaatggtttgggggaaaaaacgaatggaaatctatacttttttttttttttaaaatagcaaaataagtagacttataaggcctttagtctcatctgaattattctacagaagtaaaataccaacagtgtttctcaaatgtcatatatttatatatgtataacaatacctttttgatatactagcacgcacaaaagtgataggtacataataatttaatgtgctatttaaaattacagttgtattatagtcaatttccatcatgacagggtattctagatttaaagcaacaacaacaaacagga[132 bp omitted]ctacaacctctgcctcccagattcaagcgattctcctgcctcagcctcctgagtagctgggactacaggtgtgcactaccacacccagctaatttttaaattttttggtagagacatggtttcaccatgttggcc[131 bp omitted]tcttgaggaataatgcaccaggcctttgtgcttacaattttaaaaaaaccttagtttttaaatcattttggttactctggtgtttccaaatttgtaaattaaacacagattccaatatattaaaaagtatagaacaaaataaaatttatccatgaactgtaagtttagaacccagataaaaagagtatgtaaagtagcttatctgttattcaaaacaagcaagcaacaacaaatcttggctttaaaaaatatataaagttttccattagagcaaatagaaatttaagggcctaaagaacactgccctagggaaagcaatggagcttaaagactggaaactaaagacacgggaagaaaacaaagttaaagtttgttttataccctcagttttctgaatgtagtaactaaatagacacataaagccacgacggttctactaatctcaaaacatgtgagtaaaatatccgttattcttaagggcctttcagtggaaccaccatgctgaagggattgtaggcatttcttgaattgatgcagtttcacttcatatttggagagcagaattcatttactacacataagaagatctttgtcagacatcaatttttacttctggagttccttcacctaaggtcaggccactttcttataactgcatcacaatattgttgtctgtctgactttaagtaatacatacaagtacttttcaaattaagtaaactgaaggtaaatttgttttgagaatttggtttaatttcttgaaataattgggattatgttaggatagttgcttttcatctggagtccttagatctctagatatgtcttagagagtcaactcactgagattttatgcaaaattgtgtatgttaagtatttgtgtgtattttgtgcctatggtcaataacaatgatcacattctcaaaggggcctgtggcacacacaaacaagattaaaaactgtgctttagggtatctaaaaaccagaacgggtaatcacaaatttaagtactaagaaggtaaggtcctttggatgcacgctaatatcctaaaatcaaaggtttaaaatcaggacctgaataaatcattcttggaaaaccaaaatatcctaaacagcaaggtttaagctatcaaactaaagaaaaaatttaaaaatcctgtgtaaaggagcaccttaaacatactgattacagccatatttatgattttgaaataacaacacacgaggctgttggtaagtcagaagagtaaaggaacatagcctgctatatcaagccacacacactcaaaataatccaccttataacatactttaaaaatgtgataagcatgttttattctagagtgatctcccagccatcagagttactcaataccacaatattcattatattcattaataaatatttactgagtacccaccatgcccaaggagtaagtatacttaggtgccattctcagggatacagctttgaacaaaggagacaaaaatccttgctttcacagaactcatattccactgtggggagatagacaactacaaaactgaaacattacagcatgccacgtcaataattctgtaaagaaaaatgaagcaggaaaggagaatatgagtcctcagggaaataggaaaagacctttaggatttccactcagtagaactgacccctgaggaatccacatcttcagattccttaaaaattgattactctcctatctcctgcaaaccagactggctcagtctctgtgcaactttgttcttagatgatttactttctttctctttcccaatatatttccttttctgtaaaatggagttaatatcacctgttcttacgtggctccaggtattgcaaatcattttaagcttcttggaagaaaatttctacataaagttaatggaatatcattctcacagccttctctaacaatatcctgctaccaattctggttcctaacaggatattactcatctataacattttaaaaaatctactgtaattagcaatttgaaagggataaaagggaaaaaaacatttaaaaaatccaataaactctttccaatgaacaaaatgtaaagactttttaataaaacaaaaacaaaaagcaaaaccatgatctccaggaataccttgtttcttagacggtctcactatgttgcccagactggtctccaactcctgggctcaagtgatcctcccaccttagcctctcacggtgctgggattacaggcatgagccaccacacctggcccgggaatacctttaatactgcagacagcagggcaaaaccctgtctctacaaaaaattgaaatattagctgggcatggtgccccgtgcttgtggtcccagctacttgggggagctgaagtgggcagatcgcttgagactaggaggttgaggctgcagtgagccgtgtctgtgccactgccctccatcctggaagacagaacaagaccctatctcaaaatacaaagaaacaaaaaaagtaaagtaaattatggctagttttgggctaattacaacacacacacatatatacatacacactttactataatacaaaacccaaggaagtacctacccccccagccccgccccccaccaaccgagagtctgccaaatgaacactaaatagcctgatgggagcaatagccagggacatatttcattcattacctcctattaaccagatatgtacgaagctgaacttacaaatttttgttggatacaaatttttgttgaagtacagaactgtgatatatataaatctgtttgatgataacttataaaagagatatcttcttaacttgaaaaattatcattaaaaatattctgcagcttccttctattctgtgggtgccaggcttctaacaacaaggccaagtctagaatagaagactctaaaagccatgtcaggaaggctctgagctgggatcacaggagacaagcacctaagaatgtttgtgcgcacagaggaactgtgtctgatggtgtactcctgactacattccaaagtcagtaattaattaattggattttctgcaccttcatttacataagtaacagagttgatcatactttgaatatctactctgtacttcttctaaaggctggcatcaaaacaaaatcacaaaatttctatttcaaaatttcttcatagaaggaactctaacttgagcaatgccagttaaatgcatgctatgtcagtgtttattatttcaggttcctatattagataacttaacctagacttttaaaatgaagagaaaggtgatgaaatatgttacattataagggagatactgagtaaacagacattgtgatttactagtatctttgcaaatgaaacacaaaatgagagaaatagaagaaatacagagattattagaaggtagcaggatatgatgcactctggatcaatctcagataatggtactcatcactttcattcctttctactctggaaataaattttttatacaaagcctatactgatattctcttcatctgtggcattcttacatatacagaattttagagctggaaaagcatgggctctgcagttcaagttccagcaacaccacttactagataataatagttaatactttgacagatattaacattttaatcctcagtttccttatctgtaaaatgtaaaaaataaaggtactgaatttcttctctcataaagttattatgagaattcagtgagctaatacatgtaaagtgcatgtaaatagcacaagtttggcaatattgtattttaattcctcaacttcacagcctgggaatctgaagcctagaaaggtaaacactattttgtcccaaatcacacaactattaatatttagtgtcagcatattcttctgtgtgtagaactaaaagtcaagccccccaagtcacagtttagacactttgtcaactatagtttgcaatataggactgtctctctagctttggccaaaaacttaaagtttcaggtcctgcctacaaataatgtaaaaatgcaaagatgggataactatgtgttgactaacagataaaattaagaggcaagcagagacattgtgcaaaggggaatttctccaggaggtgctcactgctactggccaagtgctaaactactgctgctcccattgtaggtctgaagactcaggggaatacattttaatcttgatcataactttatcctggagtctaagaaaatccaggataaccagctgagcaggaagagtgtgatagagaattggtgacctctttgtgctacactaagatcctcttactcttttgctctgagaagaaagattaattttgagttgtcccttgaaataatatttataaatgataaacaggattgagaaataaaatatgactgtaatcacttttagaagtggtggcaataatattgcttgaaataaaagaaacaaacattgataagaggtaaccaaaccagaaaaccggaaattagacaatgaatcagctccaacacttttccttctacaatggtataaaccaggagagaaagaatatattccaatgtgaataaaaacagtaagaagtaatcactatcatttagtcctttttatcagtcaccgccaggtaattaggagatctgaaaagtttccttgacctagatttttgatggctattaaaataccaatccagaatagcagtggaaggtaatcctaaatatacaaattcagtggaaaacaaaagaaaaataaaagagtggaaggaaatcagagaagaggaagagacaaatattttggcaaatataggggaaacctaagaattagatactttaaagacaatgacaaacctgcaaaaagagttggaatgatacagtaatataaagaagcaactcttggggaaaataataaaatttggacaggactaaaatgagatgttctgaaatggaaaagagaggacttgagaaatagaagggcaaaggcaacaccatttcctcttctattttgactttcttctagcgcttttagaagaatattacaatttataattttgaacataccttgtaaaatgaatcattactattggcaaggagaaacctaagcacaaagactgagagataagaatcagaacaaaaatcatcaaaacttgacttttaatgcccttatacatacagccatcagataaagttgagacaaaattcttttagaggcaattctatggtctattttactattcaacaaattgggggcacattgtcaagggggggggtctccttttgtctaagaaaaaattaaaatcataatacaaatgaaaattcagtcagtttggtccttatgaaattgtctatacactgaattaattgagcaaaatgtaaagaaatgtctgattttcagaaattatctcagaattccagaaataacaacatggtttttttttttttaaatcactgttctcataactgtacattttttggtacatacatagcatcctcaagtttaaaaagatttgactgcaatctttggagacaaataatcttaacaggtaactacaacaattcataggtagaaggattcacagaattatccagaattcctcaaaaccgaagagaagactacttttagatttctgacaccagggtacagctctccattgagaaagctaaagttcagcaaagcacatctctagaagatataaacagaacttcagttaaatggaaggcttggctaaccacagttgagtaaacctgagttgcagtgtaatctgataaggaacaaacagcatggattccagaagtgtaaaccatgtgtccctaacacactagagttctttgaaagaattaatcaaagaatggataaagaaaaccatatatataattcagaagcttgttttttaaaaaagtttctcacaagaggctgttgaaaaactttaataactgttgtagattaaaaattgattaacagacaataaaccgaaaccaatatggaaagtatccagaaatgaatactaagctagtgaaaaaacttatttaaagacctaaacgaagcatatgtggacagaaaggagatgactaaaaattgccaatgacataaaactatccactgtaaaggctgaaagtctttgctaagttatgatgaaattccctcttcacaaagtaaaagcaatacttaatgtataatgataggatcaaagttaatagtttaaaaaacaaaatagattggtaagatttgccagagtgagaaaaacgatagaacaatagaagacatgataaagattgataaaataatgaatggcaaagagaatgccaactggtgctgtttgtttactttttcctttatgaaaacacaaactttatgtagagctttatgataataagattaaaacttaaaagaatacattattttatggaacacataattagcccactgaacatgctatcacaggttatcaataaggcacgtatggctctcaaaaacttcagtgatatcaaaatatgactagcaaaattacttacggtcctaaaatggagcacacaattcatgcttcagggtattaactaggcaaggccaggaaggaagtttcctttccaattgccatagtattcaagatgatttatgagttcagcttttaagtattcctaattccattttagaatccaaattatcttattcaaaaaaatcttatgccatttttccagatatactcttctttcctatttttctaaatagcaaagccttccattttcacctaattctccttcacttcatttatcccagcttcaaaatattgcctaagaagtgataatgaataaccactaaaccatatattaaagaatacatgtttaggaataagttctataatctgttaaattttcctatcttctttaagtagacaaaaattaaaattcatacaataaattggttctgttcatagtctgttcataccacaaaattaaaatttgagtttggatgctaagatggatcacacttaagaatattttaacctgtgtccagtagctacagcaagaagtgttcttttacatgataaatttcaatcaataagcaacatcattttatggagtaagacaatggaatgcccattaaaaaggtatagccctctaggctctgtctttactatggggaatgagcaattggtctatgaaatgctgtgcccccagtcatttcataaattcaccacataaagaataggccatgtatgaatgacttacaggcaaaattcacagcctgaaagcctaagaaactatgtctgaaaaacttggcggatcagtaaaaaacatgttaaatttaaattcctgaaaatgataaaattatgtgtggacaaggccaaagtgatcaggaggcaggtttacaccttgtgtccattttgtaatccagtcctctccattttggggttagcaatagggtgccacacgtggtgtaaggccagccatagcattcaagcttgactgaattttaagtgacacagtaatcaaatatgctccaagggcattccagaatttcaggtgctgctgaccattaaaatcaaccttcttagtgcttacttcaatttaaacaggatgtaaaatacaatcctcgcatcaattaaatataagctcatatatttcatctatcaaaaattagtgcccagaatatatcacttgaaaaaaaggtattattatgtctatctaagtagttatgcaacaccagtttaaaataagcagataatcttctaaaatataggatttatgtatttcctccagagtataaaataataatttgctaaatttagaatgccaataaggcagtatctactctttctatgaaatagaaagctaagcagtagaagcccgtgtatggtatttcatttgggagacaaaagaagaaagacatatttcaaacagatggaaagtgaaatataataaagttatacttgcctgcattaattttccttctgctggagttatttcagcaacaccagcaaacacaccttccaaagtgagattcagttttcctgtggggtccattttcaaggggatcactctgataatagctttctgttctgctgatctttcagactccaccgctgctgccagtaccagtcctgtgcgtccaaagcctgcctgcagggtagccatcagcagccagggccagagggcagccagctgcagctggtggccaccactcatgctaccagctgcagcaatgcacttcaaccatacatactgcttccactagctaataccaaatgcaggttctcagatccagacaaatggaggaaaagaacatttatgcttccgtttcagaaagccaagtcgtagttttggcccttcctttctctaaagtttattcccaaaaacaggtagcattcctgattgggcagagaagaggatattttcagcccacatctgctgcaggtatgtcattttctcccatcttcactgtgactagtaaagatctcaccacttctctttggaatttccaactttgcttgtgattgaatgtcacttcgtgaatttgtattatgtcagatcacttggcattgctcttccatatgcatcaagttgccaggcactaaacccaatgttcatgaacaaaacaaggcaaagtaaacagctaaggccatgcatcaaaggtgagcgtgaagaactccagctcagaaaaggaagggatggccctttttaagccataatatgtgttaatggtaaatgactaaataccacaaggagattttttttttaatggaggagaagagggaacaataataaaaatttcaggccacacgttgatgtccaaagatgctacaatatgtatttagaaaagtttccacattaaactgtatttcagtgtggccaggtttctaggcccactgcatttacatacttttcatgaacttagacataccataattttttgtgttttaccaaaatttgcctataaattaggtgctaatttatgtatcttcacacattacaggataatcctgagcatcacaaccttttccaactttcataattagagtatttgaaaaggttagctttccaattatttttcccagttaaaattcatatttccatctccattttcttttctctcttaaggattcttgattttattctccagctcggaaatgccgagcactttgatttcccatgagatgcttttggaaactactttaatatccagattttatgatctgtaattttctaggttcataagaaaaacaaaggactattcctcacatgtatccaaattccctgagggggtagggaataaaaggtagggggagcagggaggcgattaaccacaggctctaggtagaataccctgaaaaaatacaaataatcttgagtagaatagatctgtgctatttctaggcactatgaaaatttgcgtctttgtacaaacacagaataagatttttaaaatgtgcacccttaagtaaatataaatacacctcacccacaaagccctctgtgttccaaggtcaagtttaaaaatattataaagtcttcagaataagtgctgaaaagccaagcaattgaacatgaacctgttatatggattcttttcttttgctgaggcagagggaggggggaaaaaggaatttcaaaagaaatctgcaaacctgttgcgctgtcgggcccactggaatccacgggggtgaaacaaattcaattatgcttttacagatcctgctcaaaaaaggtttcaactgcttaaccaagtacagctcattcttccaccttcttactctgcaaccaaaccaagtgccccatactacaggtaggtgccgagaaattccgcagcctgaaaaaataatccatgcaggtcaaaggcagaaatttactccgggatgagagatgctgtcccctagaactaaattaaacacttacagaaaatccaaaatcatttctgaaacctccttgctaacaaaagttctttttttctccaaacagcatataaaatgatcaagtcttgaaagagaaaagaagcaaagtagcaaatacatcaacaattcactatcagaaacacataaaatcccagagagagagaaggcagtatctctgaatcatggatggacttggaaagttcggaaggattccgagtgcttcctttcagaaagacaattctggatcaactccctagagcaggaagcctgtggtttgtaattggtgttctagctctgactccctcccctgggactgcaatcacgctctctacctgctgacaaagtgagggtggagctgctagaggcaaccactccccaccctgcccccctcctcctggtgctcacacacaacacttacttaaccagacccgttctttcgctctcccccctccctcagctcctctactccctctactgagccacagctaaactgcatccaattcgatcccgagtacctttctctgggtaagcaagctaccacatgcaaatcagggccactcaaagatatctaagcagactctgcacccaacagagcatagatgatggtatgaggaaataaacagaaaaaaataaaggtaatccggaagataaaagaatggacacaaggttttgcaaatataagttcaaaaggatttctgctcattccaagtttgagtgtctataaatggcagaaagccagaataaagtgatcctgtgttttagtacttactgatttattgctgcttatgtctgctaccctgggaagggctctgtccattttatgcttagcttttcttcagctcttactaatttaaattcagtagctctgtctaaactgtgcctatatggaactttcaaatcaggttgatgtcagatgtctggaatccaactgttattttcttttcaatctttgggaggtgaaataatactatggatcagacctatgccttcaatgtaagactccaaataagtccatgtcataaatacaagccaaagggtaaaatatgattaatgagaagaacataggcaaaaagaaaatgaatttctggctaattaccacattcatgaactataatccttattactaccctgccattagaaataatacaacagtttctaatacatttataacatttgaagtttcaaattaccagattatatttgactgtggtgagacattttatttctgaaccgctgccataaactttcaaaattatacaaatgaacaacaatgtggatatagttaaatctagtgaactgtacacttaaaaatggttatgatagtaaattttatgtgtttcttacctcatgtaaaaacgaatctctgatcatctgtaaaatgctgatgataataattacgataggtctgttgtaaagattaaatgacataatgcctctgaaagcaaaaaggatgagtagcctattgaccttcaacattgtttcccctgtagataaggtttatgacagtagtttcagaatttcagatctaataactaacctagatcaaagacaaattcgaaaataaattttttgtttatttttgttgtttgagacagggtcttgtgttacccacgctggagcacagttgtgccatcatggctcactgcagccttgaccttcatggcctcccacctcagcctccagagtagctgggatcacaggtgcgtcccaccacaccctgcaaatttttttttttttttttttgagacggagtcccgctctgttgcccaggctggagtgcagtggcgctatctcggctcactgcaagctccgcctcccggttcatgccattctcctgcctc[221 bp omitted]gcgtggtgactcacgcctataatcccagcactttggttgaccaaggtgggtggatcacgaggtcgggaatttgagaccagcctgaccaacatagtttaatttaacatagttaaactaaaaaataacctacaaatgggctttgcctcatctattcctgcttaaaacgtgcaaaggaatgaaaagacctagccctagtaattaatacacacacttaattgacagaaagaagacagttacaaatgtggttgccctctcttgaggaaactctgagatttggaaatgatgatgatatgcatcatgaacctggagacttggagaaactcaagatcaaaccaaacagctctatgtagcttagttcactgttttagatcaccagaattgcaagagcaattattcttcagcttcaaagttttggagttaccctctagggttgatatactactacattttcctagagatgtcataaagatgccatcactattgtaatgaaatgcctaagtctcaatgacatctactagctagtcttatacatgagatagatcatccttcaggatctactttcacctctggattgattaaatttatcaaagatcattcatccttttccaaaaatgtaggtttctgtaaaacatgtctaagaattgtccttatccctaacggcatttaaaaaattccattgctattcaagtacaaatgaaaaaaaacttttaaaattcagattatttgaaaaataaagtaaatctcatttgaattatactattaactgtcataattattgaattttctattaatcaccaaacagtaagaacaagcaagacaacaagtctagttggaacactcactttattgttgactgattgaaatttatcagtgcttaaggtgctgaaatactgaggtactagtcaggaaccttgttagttgactagttgtgtcagaccctactggctaattcacaggaagactttattatacctcttgccattttgcccaagtcattaatgacagctttagttgatagatacaaggcgtgtaaggatagcaggagatccagctccttggtctgctgtattcatatataaaaatgtttggaaagctgattaaggcatttcattaattaagccttaaaacaactgaaaccaaatctatgccaaggttcctgcttgacatgtgttcctcaaaagatattatctcaacatctataaagctaagaaagccatatttaggggaaaatctacacagtatattagctcttcaacatgacagagaaaaagcaaagttccttcatttggaaattgggtctcctcttcacatactctgacaaaatattatatagtctggccaaaagatataggtgtcttgataatttgctcttttaaaccttgctaataaagataaataaatgcccatcacatagacattaactagtctaatcagagggaccacacaggtcgcttttcagaacctactttaatatctaaacagagtcactgcagatcaatacagagctcacccttttccagaaaagtagatctctgtaatatttctagggtttgacatcattgggaaggcacaatgcagtataagaaatgaactgttacatccacaacggctagcatagtactatgtcatatcaccaagtgcctttttaattagtttcatattcctaggctttcctttcgtttctgcagtgcttaataggagaactgaaacagaatccaataagaaagttttggtcaattgaaagactttaaatcagaaagtttcttgctgtcactggataagcaagtaagggattaaccacagaaactggacatccaagacatccttctctcctaaaacacagtcccacaatcctactgcacaaatctagaatcctgtaacagggataagaaaaaaatgttaccatctatcccattatccaaaattctctcagaagcttaaaccagattgaaaccattctttaaaaatcagaggcatagcttctactaaatggctgctaatcagttttttcccaaatttgcacacaataccttatatagatgagaatttatacttattgaatgtaaaaatctaaaataagaaaatagtatattaaatctcttaatgtttttgttcacacattgtacattttcctttcaaaataaaaatactacacatgcatcctttatccttctatcctgcaataataaaaatataaaactttaaaacctttaaatctatcagcatttataaatacaattatattaaacaagttaaatactttctttaaagacatttaaataagtgatatattaataaaatctttttaccatttatgataatgtatcattaaaattaaagaaagatatgaaaatagaagaatgcttccattaatataaaagaatcaggggctgttaagtgtgatagatggtccaagtccggatgccttgctcttaaaacagaatgctgggttaggaagtaagagaatttcctggttaatcacttagaaaattagctcttctccagagtttcttccctggaattcctgatgcatttagacctgtgatgctggtgacctcacatgcctttgtttctcacacaatctcctctaaaaggatcacactgtgacttgaatcagagagactgaattccccactaaagttgtgctgactacagtttgagtggcaagacaacaaatcagcacacacacagattattcttagtaccatagatggagcagtttttagatgctccttgactataacagaaggtcagaacttttcatttaaaagggatctgggcagccaaaaaacgtggctgctagatgttcagtagtttgtcaaggcagataatctgaactgaaccactgtagtacatacaaattcccaattctcaattaacaaaattctcaattaacgaaacaaaaaatacttttttttccttaacagaactgaaaaaatcccaacagtttgtcatgtgcaaggctagtctgcctccagctacagctagtgcacaatgtcacatttgtcatccattcctcactcttttaattcttcctcctttggaaagcgctcctgcttgcaggccacgtccaccagcagatgaagatctagaaagaaaggatagtttactccctcttagcctctctgtagagttctatagacaagttttcagacaagcagaacaagttgtctatgtctcacctgtagaactggctctaaaattgtatagtcccatcagattctcaatttcgggatattcctgtaactctaaagcacactgatgcagcccagttgtaacccaaagagaccaacaaattttagtgtccctccttttcagtagtatagccaagactcttttcacctcagttgccttttttttttttttttttgagacggagttttgctcttatcgtccaggctggagtacggcggcacaatctcggctcgctgcaacctctgcctcctgggttcaactgattatcctgcctcagcctcccaagtagctaggattacaggcatgcaccaccacgcacggctaatttttatatttttagtggagacggggtttcagcatgttggccaggctggtctcgaactcctaacctcaagtgatccacacaccttggcctcccaaagtgctgggatgacaggcgtgagccacggtgcctggccttcaattgccttttattgtaagtgaaaaagtaaggaaaagtgtcaaagggatcaaagtgaatatacacatacaaataaaaattcatttccttcatgctgtaagagtaggtgggtgggttgtgggaacatgaaaaggcaatgccttcagaaaaaacaatgttaaaataagtaatcaccatttttccaaagttgattgactctataaaattcccacttattgactaacacagctgaattcttgtaaaaacacctagctgaactgtccataaaaaagaaagcatgtcctcacacagtggttcattaagaatgaaagaagtaaaaatgcaaattaggtactaggttctgtaatacaaaaaagctaagaccatgtgtagaagttgagctaaaacgtctatagaggaacacaggcagcaataaaaggatcttaaagtggcttct[135 bp omitted]tcccgggttcatgcgattctcctgcctcagcctcccaagtagctgggattacaggcgcacaccaccatacctggctaattttttatatatttagtagagatggggtttcactatgttggccagactggtctcaaactcctgacctcgtgatctgcccgcctcagcctcccaaagtgctaggattacaggcgtgagccactgcgcccggcccagggagcatttttaggttggttttgaagtttacaactttgctttagcatttgtgagttaaagtatacagcacaaaccctttatttcattctcaacatacaaagacttttgttgctacatttttggaacacagcctctacaggattgatccacagcccgagcaggatagctgattcaaataaaatggaattctactaccacttggtagaaaatctagaaagcatttgaaatagtacctaatttttgtcatattttgtaaaagacagactagtcaccagggataggtgcttactcatctggtgaactacaacctagccatatagaacaagtaatttatccacataagtattttgtggaaggagagtttatcagtttatcacttaaaatgagtttctcatactcccatgatcacagcagtataatcagcagtattattcacaataggcaaaagggagaagaaatcctagtatccatcaacagatgaatggataaacaaaatgtggtatacacatataacggaatgttatttagccttaaaaaggaataaagcgggaccaggagtggtgactcatgcctgtaatcctagcagtttgggaggccgaggcaggcagatcacaaggtcaggagatcaagaccatcctggctaatatggtgaaaccccatctctactaaaaatacaaaaaattagttgggcatggtggcaggcgcctgtagtcccagccaccagggaggctgaggcaggagaattgtttgaacccgggagatggaggttgcagtgagccaagatggagccactgcactccggcctgggcgacagagtgagactccgtctcaaaaaaaaaaaaaaaaaggaggaagaaagccaggagtggtggcacatgcctgtagccccagctactcagaaggctgaggcggaaggattgcttgagcccaggaattcaaggctgcagtgagctatgatggcaccactgcactccagtgtgggtgacagagcaaaaccctgtctcaaaacaaacaaacaaacaaacaaaatggaggaaattctggcacatgctacaacaataggcattaggataaatgaaataaactaatcacaaaaagacaaaagacaaatactatatgatcccatttatatgaggtagctggaatagtcaaattcagagacaaaaaatagaatggtaggtgccaagggctgttgtttaataggtacggagtttccgtttgggaagatgaaaggagttttgtagatgaatggtagtgatggttgtattcacatgaaatacaaatgtgaatgtatttcatgccactgaactgtatacttaaaaatggttacaatgaggccgggtgcggtggctcatgcctgtaatcccagtattttgggaggctgaggcgggcagctcacccaaggtcaggagttcgagaccagcctgaccaacatggtgaaaccccatctctactaaaaatacaaaattagctgggcgtggtggcacatgcctgtaatcccagctactcgggaggctgaggcaggagaatcggaaaatcgcttgcatctgggaggcggaggttgcagtgagccgagattgcgtcattgcactccagcctgggaaacaagagtgaaactccaccttaaaaaaaaaaaaaaaattacaatgtgccaggtatggtgatgcacacctgtagtcctagctacctgggaggctgaagcaggagaattacttgagactgcagtgtcctatgattgcatctgtgaatagccactgcactccagcctgggcaacatagtaagacctctatctcaaaaaaaaaaaaaaaaaaaaaaaaaaacaggttaaaatggtaacttttatgttatgcacattttaccataaaatggcttctctgaagtttaagtaataatgataataatgataacagtaatacatttacataacatctctttttcaagtagctaaatgcattgtgtcaaggtcatgtaattaatcctgagtagttagtagataactaggaggaagagcctctaagccatttggctaatgagtaaagccaatggtttccaaaccttgctgcatattggaatcacctgggactttttaaaaattactgatgcttggggcccctcccaccctcagacattctaatttaatttaattggtgtggaatgcaacctaggcatcaggatttttgaaagctgaccaaaaagaataacacctaactatgatcattttctaaacctatagagacataccagctccataaaggacaggccatatggtggtagaaaatactaaaataagattttggaatatgaatagacccagttgtaaccctactttgaaagcagagtagtaattattgataaggacaaaggaaatgactgttaaagcaactacagatctcaaatggggaggcagactgaagaacagtagtaacaaacccactgaattttaataattgggctttaaagtagcatttggcacacagcttctaataacaagcatctaaacataattttattaaagcaagcttccttcattaacaaagttgccaatcaaggagctaaggagtacagaaatcaataaaaatacaaaaagacatagactagcttggtgttgctagaggtttatacgccttcactcaaaagataaacttgcatattcatcagagaagataagtatttgggaatcacaggcttgagaggtgaaaggccccaagagacaagagcattgcatctacttgtttgggaatgatcattcctaccaagagcatcctctagggttttggggctattaccttaataaaatctcatccataatccaatagctataaaatgggaagtattttcttcaggaatgaattgaactttgctcttaaacattcagtttcctttgactgtaaaactaaacatcctatcagagtgtagttcccacaatgagattaatatttgggtacatttggtttagggtaataccattgcagaaatcagaagagcatgattcagtctaatattctttacctcttggtattttttatttaaaagttatttccttaagtcagcatgtactcaaaagagctacacaaagcatgccagtggctgtaatggataacctcctccctaacaaaatacacatcactgaaatcactacaatttggacacctaatcaattcgaagtctcttatgaaaaaaaaatgttggccaggtgcggtggctcacacctagagtcctagcactttgggaggctgaggagggtagatcgcttgcatccagaagttcgagaccagcctaggcaacatggtgaaaccctgtctctataaaaaaataaaaataaatacaaaaataaattagctgagtgtggtggcatgtggctatagtcccagctactcaggaggctgaggcaggaggatagcttgagcccaggaggtcaaggctgcagtgagctgatcacaccactgcactcagactaagcaacagagacactatctcaaaataaaacaaaataaaaataaaaatgtcaaataaagcttcaagtgtgagaagatgtcccttcttacacaggttaaagaaaattttaatttagtttttaaatttttataatttagttacggaagggcactgataagttctgcaatataagatgctcctgttcaatgtgatattgagcaacataatgatattccaacagttaatgtcagaattatagcatttcagaatttgggggccaaaggagtctttagaggaggatttcatgagattctcttatattcatcataaataatgtattttaagagttggaacattattgatgagagatactcttaatgataatgacagatgaaatttaaatgatattttagaaattttttatttggttcctatcattaatattttaacttgaaatttagtatctaccaagataaaaaacatttggtcatctatgagaactaaactgaatgctattccattttgagctctccccacaaggggtgcctcctcactctcctaagggcttctctgcccatcaatgatcagggctgcaaaaatatcagaagctaagaacaaggaacaagaacatctaatacaaggttggcaaagtttttcctgtaaagagtcagataataaatattttaggctttatggcccatatggtccctatggcaattgatcaattctgctattgtagcacgacagcagtcaaagacaacacataaatgcacggctgtgactgcatgttccaataaaactttatggacattgaaatctgaatttcacataattttcatgtatcatgaaatattcttttgattttttcctccaacaattaaaaaatgtaaaaaccatgcttagcatgtaggccatataaaaactgtcagcaaaccagatttgatccacagggcttagtttactaactcctcttctaatagcacacgctatgggtacaatcaagataaatttaaggaaaacaggaaaaagatttcatcaagttgaatattgttattatagttctcaaaacaatatattttctccaaagaagatataaaaatggcaaacgagctcatgaaaggattagtcattaggggaatgcaaatcaaaaccacaatgaaggccaggc[137 bp omitted]gtggcgggcgcctgtagtcccagctactcggaaagctgaggcaggagaatggcatgaacccaggaggcggagcttgcagtgagccgagatcacaccactgcactccagcctgggcgacagagtgagactctgtctcagaaaaaaataaaaaaccacaacgaattacacctcacaacacaaggatggctctaataataatttttaaaaaaggaaaataccaagtgttagcgaggatgtagagaaactggaacccttgtgcattgctggcagaagtgtaaaacagttcagccattatggaaaatagtttaacagttcctcaaaaagttaaacatggaattaccatatgacccggcaattccacttctaggtatagaccccgaagaaccaaaaacagttactaaaacaaatactcgtatatgcatgttcatagcactattcacaataggcaaaacatagaaaaagcccaaatgcccatcagttaataaatggataaacaaattgtggtatacatatataacataacattattcagccataataagaaatgaagtactgatttacatgctacaatgtggatgaaccttagaaaacattatgcttagtaaagtaagttagacacaaatgtcacacacatattgcattatttcatttatataaaacattcagaataagtaaatccatagagacagaaaacagattggtagttgccaggggctggggaaaggtgggaatatggaacaactgtttaatggttatgggtttttcttttggggtgctgaaaatcttttggaactaaatagaggtggaggttgtatatcattatgaatgtactatatgccacttaatcgtacactttaaaatgtttaacttatagcgaggcatggtggcccatgcctgtagtctcaggaggctgaggcaggaggattgcttgagcccagcaggcagaggttgcagtgagccaagatcataccactgcaccccagcttgggggacagagcaagaccctgtctaaaaaaataaaaactaaaaaactaaatgtttggccaggcgtggtggctcacacctgtaatcccaacactttggggaggccgaagtggatggatcacctgaggtcaggagtttgagaccagcctggccaacatggtgaaacctgatctctactaaaaatacaaaatcagccgggcatggtggcgggcgcctgtaatcccagctgcttgggaggctgaggcaggagaatcacttgagcccaggaggtggaggttgcagtgagccaagatcacaccactgcactccagcctgggcaacaaagcaagactctgtaaaaaaaaaaaaaaattaaatgtttaattctatgttaattttaccttaaaaaaaaaaggtatattttcctgtcaatttgaaatgaccagacaaaaagaaggggaaagcaggaaatggctataaatacaaaattcatagttatggttgactttgtcaacctcattggattaagaaatacctagaaatctggtagagcattatctttgttttttttactgtttttgttttgttttgttttgttttttcagatggagtctcactcattctgtctcccaggctggagcacagtggcgcaatctgggctcactgcaacctctgcctcccaggttcaagcaattctcctgcctcagcctcccaagtagctgggattacaggcacccaccaccacacccggctcatttttgtatttttagtagatggggttttgccatgttggccaggctagtcttgaactcctgacctcagattatctacccacctcagcctcccaaagtactaggattacaggtgtgagccactgtacctggcctggtaaagcattatctttggatatgtgtctgtgtttctagagaagattagcatgtgagtctgagtggactaggtggggaagatctgctctcaatatgggtaggcaccatccagtcagccaggggcccagagagaacaaaaatggagaaaaggcaagtgtgtctgcagctggggtacactcttcctctcctgtccttgcacatcaaaactctagactccccagcctttgtactctgggacttacaccacaagcccccttggctcttaggctctagtcttggacaagttacaccattggcttccctggttctgtggcctttacacttggactgagctacactgccagggtctccagcttacagacagcttgtgtgggacttctcagcctccataacagtatatgccaatttccctaataaatcccctcttatatgtctatatacagtcaggagtcacttaacaatggggatatgttctgaaaaatgtgtcatcaggtgattttgtccccgcacaaatatcacattgtatatttacacaaacctagatggtatagcctactacatactgatatagtttggctgtccccaacccaaatcccaccttgaattcccacatgttgtgggagagacctggtaggaggtaactgaatcatgggggcaggttttcccgtgctgttctgatgatagtgaatagtctcatgagacctgatggatttataagggggagtttcccttcagaagctctcttctcttgtctgttgccatgtgaaacatgcctttcaccttccaccatgattgtgaggcctcccagacacgtggaactgtaagtctattaaacctctttcttttgtaaattgcccagtctcgggtatgtctttatcagcagtgtgaaatcggactaacacacataccaaggctatatggtatagcctatttctcttaggatacaaaccagtacagcaagttactatgctgaacactgtaggcaattataacacaatagtaagtatttatgtatctaaacatagaaaaggtaccataaaactacagtgttacaatcttacgggaccactgttccatatacatggtctgtcattgactgaatgtcattatttacaatcttacgggaccactgttccatatatatggtctgtcattgactgaatgtcattatgccgtgcatgaccatatatatcctattggttctatcactctgtaagaccctgactaatacacataccaaaacatatcttagttttcagtatcagagcatggtaatgagatatggaatggtgtcttttgtaaaacatacacaattcttgtttccagcagaagagaactgtagaagacaccacttgtgtaaccctattggacctagcacagtaccaagcccaaggcaggcattcagtaagtacttgctaaaagaaacctgagggtggtttgacttcccaaatattcaaaccttacctcttagtggttaactaaaagactgctcatagagacaaaatgtagacatagacacagacacagaaagtagaatggtggctaccagcattcaggggacagtggaaatggagacttactgtttaatgggtatagagtttcagttttgcaagatgaaaagagttctggagagaaatggtggtgatggtagcagtggcattaactgaactgtacattttcaaatggttaagatggtaaattttatgagcatttatcacaattttttaaaagactgcatttttccataaatttttaaaaagtacattagtaagataagaatgtatatggagaaaaaaagcaactcattcatttatttatccaacaaggagtgccacaggtaatattctaggtcctggggatacaacaatgggtaaaacaaccacagagaaccaaccttctagaaagagtgggggtgggaattatagaaaaatagcaagtagtaataggcactgcagaagaaaaacaaagaagaataaagactgaaggagggcaggacatggggaacagggtgccatttcagatggcatggtcaggaagatttctgtgatgatctggcatctgagcagaggactgaatgaaatgaaggaacacaccatgtgaaaatctgggtgaaaaacatttcaggcagagacaatagcaagtgtaaaggctggagcattcttggtatgcttaaacaatagtgaagaaactgctggggctggactagatgagggagatagaaggtggtaggggatgaagccagaacagttgccaggagccaaatcattcagcatcttgaagaccacagtaaggattctcagattttcttctacatatatatatatagaaaactattaaataaatttagatgggaaaataattactgatttaagagatcactctggcagaaagactgtaggggccaagagcagaagcagaaaaaccttaagaagctactgcagtcatctaggcaagagaaagtagtagcttggaccatggcgacaccaaataaaggaggtgagaaatggtcagattctggatctgcatctacagtgagctgataagatttgctgatggactggacatgtgagagaagggagtcaagggagactccaagagttgtggctgaccagatgactagaagtaccattcattcattcattcattcattcattcatctgagacaaggtcttgctctgttgcccaggctggagtgcagtggcacaatcacagctcactacaacctctgcctcccaggctcaagcaattatcccacctcagccttccgagtagctgggaccacaagcacctgccaccaagcatgttttttgtagagacatggtttcaccatgttggccaagctagtctcgcttaagcccaagtgacctgcccaccttggcctcctaaagtgctgggattacaggtatgagccaccacgcctggccaatactatttatttataagtaaataagtaaaattggggaaaaggtagaatatattaagcttgggacacctactggacatccaaagacgtagcgtaggcagtagtgtatacaagtgaggttcagagaagattgagacttaagatacagatttcggagacaccactacaaaggtgataataaaagcatgagactggttaagattacctaggaattgaatagagagagagaaagaattgagctctggggttcatcaatatttagaaattaggaaagttgaagagtattcagtaaaagaaactacagagttggccagtgaaaactaggaaagggagatgttccacaagccagaagaaagcatttcaggaaggttgaaataatctgttcaaatgctgctgaggtgaattaagtaaaatacggactgataattggctactggatttggcaacatggcagtcattggaaaccttgacaaatgaagtttcagttgagcagaagaaagaaaaatctgcttggagtagttgaagtaaggatatgcttccaaggagctttgctctaaggaaagcagaaaaagtagaggaatagctacatggaggtatgaaggaaaggtcaaagggattttttttttttttttttttagatggagcttcactcttgtcgcccaggctgaagtgcagtggcgtgttcttggctcagtgcaacctccgcctcccggattcaattgattctcctgcctc[221 bp omitted]ttgcatgctgatgggaattatctaacataaaagataaaatgttaggccgggcgtagtggctcatgcctataatcccagcactttgggaggaaatcgagaccatcccggccaacaaggtaaaactccatctctactaaaaatacaaaaattagctggatgtggcagcgcgtgcctgtaattccagctacttgggaagaggctgaggcaggagaatcgcttgacctgggaggcggaggttgcagtgagccgagatcttgccactgaactccagcctggcaacagagctagactccatctcaaaaaaaaaaaaaagataaaatgtggccaggcactgtggctcactcttataatcccagcactttggaggccaaggcaggaggatcacttgagaccaggaaatcaagacaacctgggcaacatggcaagaccctgtctctataaaaattaaaaaaattagctgggcatggtggcatgagcctgtggtcccagttactcaggaggctgagatgggaggattgcttgagccgggaagtcgaggttgcagtgagctgtattcacaccactacactccagcgtggatgacagaggaagactctgccttagggggaaagcaaaaataaagatacaatgtgattattgaagagtaagggggatagcagtaggtcctaagtctgtgagtacaccaaaggggacaggattctgtatacaaatgaaaggactggcccttttccattataacagaaggaaaggcagcgtgtagggttacaattggaagtagactgataaatatgttggtgggaagatatgaaagcttcattctagctgcttctattttctcagtaagatataaaacagggtcacagccacgaatgaagagagaggaggagtgttggaaacggagcagagaggacaggatataatagagtggctttggagaatggggaatatattgactagaaaatattataggactgctgcaacactgacagcctacgtgaatttaaagtgagactaaggcggggtgcagtagctcatgcctgtaatcccagcactttgggaggccaaggtgggtagatcacctgaggtcaggagttcaagaccaacctggccaacatggcaagaccccatctctactaaaaatacaaaaatcagttgtgtggtggctcatgcctgtagtctcagctatttgggaggctgaagcacgagaatcgcttgaacccaggaggcggaggttgcagtgagtcgagatcacgccactgcactccagcctaggcaacagagtgagattccagctcaataaataaacaaataaataaataaatagagactagccatctgaaaagtaaccagtggtaataaacataagaacagtaaatattggctgggcgctgtggctcatgcctgtaatcccagcactttgggaggctgaggcgagcaggagatcgagaccatcctggctaacatggtgaaaccccatctctactaaatatacaaaaaattagccgggcatggtggcgggcgcctgtagtcccagctactcgggaggctgaggcaggagaatggtgtgaacctgggaggtggagcttgtagtgagccaagatcacgccactgcaccgcagcctgggcgacagagcgagactccatctcaaaaaaaaaaaaaaaaaaaaagtaaatgttataaaaatagctaaaattctattgctactatgtatggactacttactatgtaacccagcataatactaagccagttctatgatttatatcattataatccatattcctcattttgcagatgaggacaccaaagctcagttaggtaaacacgtccaaggtcacacagtaaagagcagaatccaggttttaatgcaggtttttctaacaccaaaagctttctttctaaccatatgctgtactgtttttaatgagcagtatattaatctcacacattgactttggttaaggtctcttaatgccatgggaccttacatatagccatgttttcatagaccaactgctaggccaaggtctatcagagcagaatcatttgcaacttcatgaattgtatttctgcctacactttaattaaaaaactttttttttttttagcagagaggttctagcttaatcataactcattttcctcttgtccataataaaatgaaaatgtgattaggtgtcataatgatgccaagatttcacaactcttatgtttcacagcaggaagccaacatcaattaagactcatctattaactgcactgaccaaaggataaggctttacttagaaaaaaaaaacaacaggaagagttaataaagataattactgtgctaattattttatcagttacacttataaccataacatgtagtgaaagagaggaaattatttttttaacagcaggcaccagagttcctctcagggaggtaattgtctttgttgaggaatatgtctcgatagattgttctggttgggaaaaatgacgccttaaaaacatcaaaaaatagaagagatacctaaccttctttgcctaagtaaaacacaggaattcagcacctggggaaagagcagaaaaaaaaaaccaaccataacaacaacaacaacagaaagcagagaaacgaaggtctggtgctagtacaaggaaagaaagcaacatggcagaggaccatattgactagtgacaaggaaagatgccgtaaagtgactgggggccttttaattccatttttgcggtattctaaatatttctgtcggtatttctgcctcccgacatcttcataaaagtgtgctacacatacacatgcctagcataatgcttaaagggaggaagaggtcaaagaaagtgggccaagttctgcatctggtatagcatggaacagacagataagaacagccctgggaggtcagatatggacaagtctggaattacatttaagcagaaactcaaaaataaaagctactgtgaaccctagaaagtctcagaaatcttagaaaggcattcttggtatagggtaagtttatcttgagtcaatcatatctaaacctcaaaagtcagtttactatctgggatataaatattttttaaaaacactctgaaattgttcatttctattactttaaggcttttatattcctgctataggaacacttcaagtatttaaactacttttagtatttttagattttttaaaatttgaaaaacatagaagaatacagatggtgaaaatttcccgtaatcctattatatatacatatacaaattgagaagttaagcatacccctgcacccatacattctatcttctgagagataactagtgttatatttatcagctatatcgtatatctccagacttttttctataattttacagcatatactttcttttctttctttctagaaagggggttgtgctagacatattgtgttgcaacttacccatttgctgaacacattatgaacacttactgtctttccaggtcacaacacatcaagctacttcagtttcttaaatggttgcacagtattttattatgtagatgtcataatgtatctggttccccactgtcaggcatttatgcttttctcaaatttttgctattataaataacactatagcaaacttattttgagtacctttgggaatatacacatttctacaggagagattcccaggagtagagttcctgagtcaaaactcataagcattttagttatctataaataatgccaattgtcctttatagggctatacgaatttacattccaattacagcatagagaaggttccttttctctatacctttatcaaagctggatattatcaacagttaaagttttgccaatcaaattgccaaaaaaaaaaataattggttgattttggtcagtgacagaccatatagatgatgatgattctgtaagattgtactctatttttactgtaccatttctatgcttagctatgtttagatacacaaataccactgtattacaattgcttacaatattcaatacagtaacatgctgtaagggtttgtagcctagaagcaataggctatactatacagcctaggtatgtagtaggcaacatcatctaggtttgtgtaagtacaattcacaatgtttataaaacaataacattaactaatgacatagttctcagaatacattcctgtcattaagggatacatgattatatgtgctactggctttgcagtcaggcagcacatggttaggacacagcaagctagaatgttggtgatctttgttatccatgccaacatatttggtaaaatcattacctgtgacaccatggaagtcagaccacacatgccaagtgaacatacaaccatgggggaaaagattgacaaaaatcacaaggtgttgactatttcttgacacattcagcaaagccctaaaagaagagataaactcaggctagaggtacctagtgtgcaagcagagatggaagggaatatttgactgcctgtggttgacaacttattgactagagttcagtaactgggtcatgaatccaactgcttcaataccccaacctgaagttgcactaagaagtgccttaaggccaggcatggtggctgacacctgtaatcccagcactttgggaggctaagttgggaggattgcttgagaccaggagttggagatcagcctgggcaacacagtgagactccatctctttgaaaagtaaaaaaaaatcagctaggtgtggtggcatgtgcctgtagtcccagctacttctttggggggttgggggtaggttggttgaggtgggaggatcactttagcccagagatcaaggctgcagtgagctatgatcgtgccagactaggcaacagagtgagaccctgcctcaaaaaaaaaataataataaataaaaaaaattggtggtacatgctgattaacattaagctaagcccaacagttgacaaatcttgtcaacagagcttctgtaagctttttaatgctccattcttgaatagggaagaaagccaatggaaaaaaaaaacaaaaacaacaacaaccaaaaaaaaaaaccagaaagaacgtagaggaaactgacatatgttgtggggaaacaacttcaaaaccagcccttccatttagtatcctcagagagctataagaagatattatatccatataaaagaacagcaagttcccccaaaaaggaacaattatagaatagaataaaaaagagctgttagaagttataatttttttttttttgagacggagttttgctcttgttgcccaggctaaagtgcaatagcgcgatctcggctcactgcaacctccacctcccgggttcaagcaattctcctgccttagcctcctgagtagctggcattacaagcatgcgccaccatgcccagctaattctgtattttcagtagagacggggtttcaccatgttggtcaggctggtctggaactcccaacctcaggtgatccgcccgccttggcctcccaaagtgctgggattacaggcatgagccaccatgcccaactggaaattataaatttagtagccaaatttttaaaattaaacatttgaaagtttcatctgaggaacattccacaaaatagaaaaaagataaaagtataacaaaattgaaagaaaaaaacagagagagaagttcatctcagcatatccaatactggactaaagaaaaaataggaaaaatggaagggtaaagaggtaagaatttttttttttaatgatatgaccacttctggtaatgtcaggcctgataattaagaccagctttcctattgaagacaactaaaaaacctggacagatgatagaaacaatattctttaaaagtctcaaaaggtaatgagatagtaaagaatgactgggctgagtgtcaggtgagagtggggatccagagagtaagccttgtatttgaggctacttttacctttgtgacatttgccatctgtaggagattgagaggctgagctttgccttttgggtctagagggacaaatgtcagagactgggcttgtcaaaggttgagttctgatgagattcccacttttatggctaggatctcaataagctgcacccaggagaggatgaaccacagggaaacaagcccttgcacagtttgtggtcagaaaaatctcaggctctgaactggattaaggtgatccctaattgccagtgaccccaattgcctggtagaaacaaatcttatttgaggaagataatgtcatcctaggccttaaattatttttacaagtaacttttcaaatactattcttcaaatactatgtccagcatacagcgaaaataaccagttacatgagggagtagccactgtggttgagaaccaacacaaatgagacaactgaaagagacctgtggaaactccatatactggaattaccagaattcagcaagaaaacaaccatgcttactatttcaaggaggcaaattccaagcttgaaaaattttggcagataactagaaactcaaaaatgtgaccagaggtctggaaaaaagaacaaacagaaatcctagaattgaaaaataatcaaattaataactcagtggatgagtcaaacagcacattagacctagtctcagagaaagagtgaacatgaaggtagaagaaataactcaaaaaggaaatgtggaggaaaaaaatatgagaggtttaaaaaaattaagacatagggaattcagggaataggaaagatgtgaacaacataatcaacacttaatctaattgacagatagaacactacatttaacaactgcagaatacacattactttcaagtgcaaatggtatattcaccaagatagaccatacactgggccatgaaacaagtctcaataaatataaaggatcaaaattatacaaaatgtattctctgaccacaacacaattaaattagaaatcgataacaataaagtaactaggaaaacctcaaatatctggaaataaatataaatttatttaaatatctgggaataaatctaaaaatgcatgaatcaaagacaaaatcacaaggaaaaagaaaatatttttaactgagtgataatggaaatacaacaccaaactttgctggatgcagctgaagcgatgtttaaagggaaatgtatagttttaaatgttaatcttagaaaagaagatctaaaatcagtgacctgaagttccaccttaaaaaatcagaaaaggaagaagaaagtaaacccaaagtgatacgagaaaggaaataatatagataagagtagaaatcaatgaaatagaaaacagacaatggaaaaaattaacaaatacaaaagttggctttgaaaagaagtaggcaacaaaaacttgatcattccaaaaaaaaagcatatccctgaggaccacttcagatgagtccatgaaggatagtgaaccaggaagagccctcttggaagggaacgccagaggtgatggagacaacaaatagaaaaatactcccagaaagcaaaagcagggcttcactgatgggctaaccaaggaatttatcctactgtcaaggcagaaaatctttgcagtttccatccagcaggatttgataaatgctgtgaaacagcgactgttgtatgtttcctatttttctcttttttgagtgaaagttttacttgttacatatcctattctaatactctaatttgggtatgtgtgagtgaggggggaggatggataacttgttttttatgttacgagacaaagaagagccatctaacagaaaagaatttcataatactcaagagatcctgactttaagcaggatgccataattgtatgggtctttggcattgtctctcttggggagaatgtgagcatgttctgtgtatactaacatggctgtgctctgataattgggtagtcaaagcagtggatttggcagaggctgtcccccagaagtcatttacctcttcttccatggtggtggaatgcttaggtgggtacatggtcacctagccaaagatttcttttccaaaactaccctaaaattaattggctgtggctatgtgatcaaagtcaaagagttgtaaacatacaggatgtatataacttttcaccttatttcaagggtgaggtcctccagtacagtgttgaagataagtagggaaagtggccatccttgccttgttcccagtctctggggggtaaatggtttagcttttcaccattatgatctttactgtacacactttatagatactcttttattggtttgaggaattttctgccattcctagtttgttgagagtttttactataaaatagtgcaaaattttgtccaatgctttccctgcatctattaaatggtcatagtttttctcgtttatattgttaatatggtgaataacattaacatttgaaaaataagccttgcatatctgagacaaaccaagtagagtttgtctcataagtggaagagatgggctagacttagttagtcctttaattcttttttgtttgtttgtttttgtttgagatgtagtctctgttgcccaggctggagtgcagtggtgccatctctgctcactgcaacctccacctcccagattcaagtgattctcctgcctcaacctcctgaggagctgggactacaggcatgcagcaccacacccagctaatttttgcatttttttttttttgagacagagtttcgctctgttgcccaggctagagtgcagtggcagtgatctcggctcactgcaagctctgcctcccaggttcatgccattctcctgcct[133 bp omitted]tggcctcccaaagtgtaatttttgtattttttagtagagacagggtttcaccatattggccaggctggtctcgaactcctgaccctgtgatccacctgccttggtctcccaaagttctgggattacaggtgtgagccactgcatctgatcagtcctttcattcttagttccccaacttgacgactgctgaaacagagatttctaagtcccacccctgtctttcattttttttaaaggagaaacatccaatttctacctaccaacgctcttcagaaggaggcaaggatatgtggatgtgttaactactctatatatgacccgttaatcaacttgcctgctctcgagccctctgcctcaacccatcccctaccaaccaaccccatccctcagtctcaagcatctcttcctttgtatacactcaggaaagcatcttgtctctgaacctttgaatatactgttcttaaatcataatcagaggtatctatcctttaactttctttttagtttctcttgttatattagttcagtagtctagtacgtgtaaccataaagtaatgagaataatttttaacaaatatacccaaacttatataagagaaacttttccctccggagtattatctgaaaaggttatctgcttattcgagtgactgtgccattactaagatgatgtagaaaaaacatgtggttacgtctggggaagacataaagggaacagtatggggaggtagtagtcaaagggaattctggccttagcagttcttacaaggagaatgtatttgtgcactgtttgtgagattaaaacttaaaagtaaagatttcatttacaatagcatcaaagagaataaaataggaataaatctaacgaatgaggcaaaagacttttacactgaaaattacaaaacagtactgaaagaaattaaagatgacactaataagtagaacacattccatgttcatggactggaaatattgttaagatgtctatactacccaaagcaatctacagttcaatacaatgcctttcaaaatctcagtgaattttttttaaagaaatagaaaaattcatactaaaattcgtatggaatctcaagggaacccaaatagccaaaacaattttgaaaaagaacaaagttagaggactcacacttcttgatttcaaaacatactacaaagctacagtaatcaaaacagtgtgctactggcataaattcagccaaatatatcaatgaatattcaatagactaaatatcacatatattattaaatgaccttcaacaagggtgccaagcccactcactggggaaaggacaatctctctatttaacaaatggtattgggaaaactggatatccacatgcaaaagaatgaagttaaacgcttacaccatatatgaaaactaactcaaactaactaacttaggtctttaggattaaagacctaaatgtaagacttaagactataacaatcctagaagaaaacagagagagataacttcacgacactggacttggcaatgctttcctggatatgacacacaaagcacaaggaaaagaaaaaacagcaaaatagacagatgggactacatcaaacttaaaagtgtctgctcatcaaaggacaaaatagcataaaaggcaactcacagaatgggagaaaatatttgtaaatcatattcgctaaggggttaatattcagaatatgttttaaaaactcctacaactgaacaacaccaaaaaatcaaacaaaccaattgaaaaatgggcaaaagacttgaatatacattttccaaagatgatatacaaacagccaatgagtatacaaatgatactaaacatcactaattatcagagaaatgtaaaaaaaaatcaaacctataatgaggtatctatcagctcatgctcactgagatggctacttacagaagccttccttaaaaaaatccaggaaataataaatgttgatggggatgtggagaaattaaaactattttgcaatgttggtgggattataaaatagtatagcagctatgaaaaacagtacagagtttcctaaaaaaattaaaaattggattaaccatatgatccagcaatccattactggatacatgcaaatgaaatcagggtctcaaagagatagttggagccaggcgcggtggcacacgcctgtagtcccagtacttgggaggctgagaaaggaagattatttgagtccaggagttttgagtctagcctgagcaacattgtgaggcctcatctcttaaaaggaaaaacaaaacagatatttccacccccaagttcacagtggcactattcacaatagtcaagggatggaagcaacctaaatgtctattaagaaatgaataaacaaaatgtcatatgcacgtacaaaggaatattattcagccttagaaaggaaatcctgtcacgtgctacaacatgaatgaaccttgagaacataatatagtcacaaaaatacaaatgctgcatgattccacttatatgaggtacctggaatagttaaatgcatagaaacagaaagtagaatggtggttactaggagccaggggaaggaggaaaaggaaagttgtatttaatgaatatagagtttcagatttgcaagataaaaatgttctagagatctgtttcaaacaatgtgaatatactactgaactgtgcacttaaaaatggttaaaatggggctgggagtggtggctcacacctgtaatcccagcacttcgggaggccaaggtgggcagatcacccgaggtcaggagttcgataccagcctgcccaacatggcaaaaccctgtctctattaaaaatacaaaaaaattagccaggtatggtggcaggcgcctgtaataccagctacttggaggctg[131 bp omitted]cagaggcagagcaagacggcagttttgaatcctctagtgattctccccccacaggaacatcaactatccattcaagaaaacaccttcacaagagctgaagaaatcaggtgatgaatcacagtgcctggatttagcataacaagaaaagacacattgaagagggtagaaaggacagtctcacattgcccagagcaccctacccccaaccccacgcaatgcagcatagagaaaatctgtacacttaagagaggcaaagggaagtatgggggagattttgcatttgaacttagtactggtgccatcgcagcaaaatacagcaaggggcagaatcctgtggcccttgattccatgccagtgcccatggaaggggcattcagatctgccctgggccagaagataatccactgccacagtgggaagaaactgagtcttggcctgatccactgtgggctgactaaagtggcctcaggtcctgaataaatttccgtggcaggcaggccagagcaacagtggttcttgggtgagccctaacactgtactgctgtgggaggctgtaggcttggggtgcgacccaacacaataccagttgcagtagctatctgagtgccacgtcatccctgtcccagctctacacagtaaagtgtg[132 bp omitted]aaactctgtctctactaaaaatgcaaaaattagccaggtgtggtggcacacgcctgtagtcccagctacttgggaggctgaggcaggagaatcgcttgaacctgggagacagaggtttcagtgagccaagactgtgccactgcactctagcctgggcgacagagcaagactccatctcaaaaaaaaagagacgaaagagtgcaggggactctgtctaggaacctagtaccagccccaccacattaaaacacagcacctggcagaacaccaaagcccctgattccactctagtgctcctggatggtgcttctatacctaccctgggctagaaagcaatctgccaccccagcaggaaggacccaagtcccagccagcttcaccactgtctgactaaagtgatctcaggcctgaataagtatcagtggcagtctgacagtagtgacagagggtcttaggcaagacctggtactgtgctgctctgtgatgctgtgggcttagggtgtgatccagcatagcaccggctgccacagccatgggaatacccatgtcacccctccccaaactccaggaagtgcagcatggacaggaactccttcaacttgggggaaagagagggaagagtgtagggggactttacttgagaacccagggaactctccctgatcttcctcaagttcattaggactggagactaggagtctgcaagagctgcagcgtacgtgggcttagggtgccctctactgctgagtggttacagtgaccacaggcttagggaactcaacaggcagtcctctttgaatttctggaaggccctctgaaggaggacaggtacaaacagggccagactgcaaagactagaataaatacctaactctctaatgcccagatatcgacaaatgtccactaatatcaagaacattcatctgggcgcagtggctcatgcctgtaatcccagcacttgggaggccgaggcaggcagatcacatgagcccaggagtttgaggccagtctggccaacatggagaaactgcatctctactaaaaatacaaaaaattagccaggcatgatcccagctacttggcaggctgagacatgagaatcacttgaacctgggaggtggaagttgcagcgaattgagatcaggccactgcactccagcctgggtaacagagtgagaacctgtctcaaaaaaaaaaaaaaaaaaaaaggtagaaagaaagaaaaagaaaaaaggaaatagtcagaggagaaaaaaagaactaaaaggaacaaagaatgcctataagatctatgggacagaattacaaagagcaaatataagactcaatggccttaaagaaggaataaagaaaaaggggtagaaaacttattgaaataaacagtaacagaacactttctaaacctagagaaagatacaaatattcaggtacaagaaggtcagagatcaccaagcagatcccaaatgagactacctcaaagcatgcaataatcaaactcttaaagatcaagaacaaagaaagaatcctaaaagcagcaacagaaaagaagcaaataacacacaaaggagctccagtacatctggcagcagacttctcagcagaaaccttacaggcaagagagagtgggatgatgtattctgagtgttgaaggaaaaaaaaattgccaatcaagaatactgtacctagcaaagctatccttcaaacatgaaggagagataaagattttcccaaacaaaagctgagagaattcatcaccaccagacctgttttactagaaatgttaaatgtgcaacaagaaaacatctgaaagtataaaaatcgttgataaaagtaagcatacagagacattcagaataccctaatactgtaattgtgatatataaaccactgatatctttagtgtaaagcctaagacaaaactattaaaaataataaatacaaaaagaagaaagattaataactacaacagtttgttaaaagataggcaatataaaaagatgtaaattgataacatccagaagtcaaagtgtgaagggggatggagttagtatagagtttaagggtttcttgtttgtttgtttcttttcttttctttgcaatcaaagtcaagttgtcatcagtttaaaataaattataactgtaagatgttttttgtaggccttgtggtaatcatagacaaaacccataactgatacactaaaaataaaaagcaaggaattaaaataaactaccaaagaaaatcacttacccacaaaggaaagcagtaagaaaggaagaaaggagttacaaaacaaccagaagaactaacaaaatggcagtaataagtcttacctgtaagtcataactttgaatataaatggactaaattctccaattaaaagacatagagtggctgaatggattttttaaaagacccaactatatgctacctataagaaactcacttcacctataaagatacgcacacaatgtgccgggcacagtggctcatgcctgtaatcccaacacttctggagaccgaggcaggcggatcaccagaggtcaggagtccaagacaagcctggccaacatggtgaaaccctgtctctacaaaacctgcaaaaattagctgggtgtggtggcagacacctgtaatcccagctactcaggaggctgaggcacgagaatcgctggaacctgggaggcagaggttgcagtgagctgagatcataccactgcactccagcccaggtgacggagtgaggctccatctc[224 bp omitted]gaggcaggagaatggcgtgaacccgggagacggagcttgcagtgagccgagatcccgccactgcactccagcctgggtgacagagcgagactccgtctcaaaaaaaaaaaaaaaaaaaaagatatgcataggctggacacggtagctcacacctgtaatcctagcactgtgggaggccaaggcaggcagatcacttgaggtcaggagtttgagactggcctggccaacatggtgaaattctgtttctaccaaaaaatacaaaaaaattagctgggcttggtggcgtgtacctgtaatcccagctacttgggaggctgaggcacgagaatcatttgaacccaggaggcagagtttgcagt[131 bp omitted]ccatcatccaaacaagaagagcattagctatacttatatcagataaaatggactttaaggccaggtgcaatggctcacgtctgtaatcccagcactttgggaggctgaggcaggtggatcacctgaggtcgggagttcgagaccagcctgaccaacatggagaaaccctgtctctactaaaaatataaaattagctgggtgtggtggtgcatgcctgtaatcccagctacttgggaggctgaggcaggagaatcacttgaacctggaaggcagaggttgcagtgagccaagatcgcgccattgtactctagcctgggcaacaagagcgaaactccatctcaaaaaaaaaaaaaagga[134 bp omitted]atggtgaaatcctgtctctactaaaaatacaaaaattagccgggcatggtggtgggcgcctgtaatcccagctacttgggaggctgaggcaggagaatcgcttgaacctgggaggcggaggttgtagtgagctgggattgtgccaccacactctagcctgaccaacagagtgaaactctgtctcagaaataataatgatgatgacgataaaggggttaatacagcaggaggatataaaagttgtaggtatatacacacccaacactggagcacctaaatatataatgcaaatattaacaaacctaaaaggagagatcaactgcaaaataataatagtagaggacttaaacacccagctttcagcaatggacaaatcatccagacagaaatcaacaaagaaacatcagagttaactgtgctttagacctaatggacctaacaaacatttacagaagattgcacccaactgctacagaatatatgttcttctcaacaacatatggaacaatctccagaatagaccatacgttaggccataaaagaagtcttaacaattttttttaaaactgaaattacgtcaaatatcttttctgaccacatgcaataaaactagaaatcaatacaggaagaactttggaaactgttcaaatacgtggaaattaaacaatatgctcatgaacaaccaatggatctacgaagaaattaaaaagaaaatttaaaaattccttgagacaaatgaaagtggaaatgcaactaccaaaaacctatgtgatacagcaaatgctgtcctacgagggaagtttatggcaataaatgcctacatcaaaaaggtatagagacttcaaataaacaatattatattacatctcaaggaactagaaagacaaaaacaatctaaacccaaaataagtagaaggaaagaaatagtaaagatcacagcagaaataaataaaatagtttaaaaaacaatataaaagatcaccaaaacaaagagctgtttttttgaaaaggtaagcaaactaaacaagcctttagttagactttaaaaaaaaaaaaaaaaaaggacggccaggtgtgactcatgcctgcaatgcactttgtgagactgaggcaggaggattccttgaggacaggagttcaagactagcctgggcaacctagcaagaccctgtctctacaaaaaaaaatttttaaattagccaagcatggtgtcacacacgaggagtcctagctactcaggaaggctgaggcaggaggatcacttaagcccaggagttcaaggttgcagtgagctattatcgtgccactgtactacagcttcgcaacacagtgagaccctgcctcgaaaaacaaagacaaaaaaacaaaaaagaaagaaagaaataataaaaaaacctctaaatcagagttgaaaaaggagtcatcacaactaacaccagagaagtacaaaggataagagactactatgaacaactacacatcaacaaattggaaaacctagaagaaatggataaattcctgaacacataaaatgtatcaaggttgaatcacaaagaaagagaaaacctgaaaagaccaataatgagcaataatatcaaagcagtaataaaaagtctcccaggtggcctcgcatggtggctcatgcctgtaatcgcaacactttgcgatgctgaggcaggaggatcacttgaggccaggagtttgagaccagcctaggcaacatagcaagacttcattcctacaaaaaatttaaaaattagctaggcgtcaccgcaccatctgggaagtgaggcgcacctctgcccagcggccgcaccatctgcgatgtgaggagcacctctgcctggcctccacgccaccctccaggtgtgaaatggcagccttgtgtgtgtgatctttctgccctccccaagtttgcatgttcaacagtgaagtttacttttaaattaaaagatttaaattggggaagataaaaaaaaaaatagctgggaatggtgttgcatgcctgtggtcccagctactcaggaggctgacatcagaggattacttgagcccaggaggctgaggctgcagtgagtcataatcacaccactgtacttcagcctgggtgacagagggagaccctgtctcaaaacaaacaaacaaaaagtctcccagcaaagaaaagcctaaggcctgatggcttcactgctaaattctaccaaacatttaaggcactaataccagttctacttaaactattccaaaaaattggagaggaagaaatattttcaaactcattctataaggccagcattaccctaataccaaaaccagacaaaaacacaacaacaaaaaaagaaaactacaggtcaatatccctgaagaacacacatgcaaaaatcctcaacaaaatactagcaaaccaggccgggtgcagtggctcacgcctgcaatcccaacactttggggggctaaggcaggcagatcacttgaggtcaggagtttgagaccagcctgaccaacacggcgaaatcctgtctctactaaaaatacaaaaattagctgggcatggtggcaggcgcctgtaatccctgctactcaggaggctgaggcaggagattcacttgaacctaggaggcagaggttgtgatgagcttaagatcatgccattgcactccagcctgggcgacagagtgagcaaaactccatctcaaacaacaacaacaacaacaacaacaacaacaacaaattaaaaagatcattcaccataatccaagggggatttatcccagggatgcaaggagggttcaacatatacaaatcaatcaatgtaatacattacattaacaaaatcaaggatgaaaaccacatgatcatttcaacagatgctaaaaaatcattcagtaaaattcaacatcctggccgggcatggtggatcacacctgtaaacccagcactttgggaggccgaggtgggcagatcacctgaggtcaggagttcgagaccagcctggccaacatggagaaaccgcgtctcttctaaaacacaagaaaaaaaattagccaggcatggtggcacgcgcctgtagtcccagctacttgggaggctgaggcaggggaatcacttgaacctgggaggcagaggttgcagtgagccgagattgcgccactgcacttcagcctggtgacagagtgagactctgtcacaaacactctgcctaggaaaaccagagacctttgttcacttgtttatctgctgaccttccctccactattgtcctatgaccctgccaaatccccctctgcgagaaacacccaagaatgatcaataaaaacaaaaacaaaaacaaaacaaaacaaaaaataaataaaaaaataaataaaaataaaaaataaaattcaacatcccttcatgataaacacaaactggtcatagaaagaacatacctcaacacgataaaggccctgtatgacaaacccacagctaacattacattgaatgatgaaaagttgaaagcttttcctcgaagatctggaacaagccaagaatgcccactttcaccacttttattcaacacagtactggaaattctagccagaccaattaggcaagagaaagaaataaatggcatccaaattggaacggagaaagtctaattgtccttgtttgtggatggcatgatcatatacatagaaaaccctaaagattccaccaaaaaaattggaactaataaatgaatttagtaaagttgcaggatacaaaatcaacttacaaatatcagtagtgtttctctatatgccaatagtaaactatctgaaaaagaaatcaagaaaccaattccatttatagtagctacaagaaaattagaaacaaacttaaccaaggaggtgaattatcctcacaatggaaactataaaacattgatgaaagatgttgaagaggtcacaaataaataaatggaaggatatcgcatgtgcatggattggaagattattgttaaaatgtccatattacccaaagtgatgtacagatttaatgcaagccttatcaaaataccaatgacattcttcacagaaatagaaaaaaaattcttaaaattcatatagcaatacaaaagaccccagacagccaaagcaatcctgagcaaaaagaacagagctggaggcatcaccctacctgatttcaaaatacactaccaaagcgatagtaaccaaaacagcatggtacaggcataaaaatagacatctaaatcaattgtaacagaatagagaacccaaaaataaatttatacatttatagctaactgattttcaaaagttgccaagtacacacattggagaaaggacggtctcctcaataaatagtgctgggaaatttggatgtccatatgcagaagaaggaaactaaaccccaatttctcaccatatataaaaatcaactctaaattgattaaatacttaaatgtaagattcaaaactatgaaactattagaagaaaacatagggaaaatgcttcatgaaaatggactgggcgaggactttttggataagacctcgaaagcacaggcaacaaaaacaaaaatggacaaatgggattacaacaaacaaaaaatcttctgcatagcaaaagacacaatacaatgaagagacaacctacataaagagagaaagtatttgcaaactatacatttgacaaaaggttaatatgcacaatacataaggaatttaagcaactcagaagcaaaacaaataaaaaaacaaaaaacagtctgattttaaaaatgagcaaaagacctgaatagacatttctcaaaagaagatacacaaatgaccaacagatatatggaaaaatgctcaatatcaccaatcatcagagaaatgcaaatcaaaaccacaatatcacctcaccccagttaaaatggctattataaaaaagacaaaaaataacaaatgctggcaaagatgcagagaaaagggaactcttatatgctatttgtaggaatgtaagttagcatagcattatagaaaaacagtatgaaggttcttaaaaaattaaaaatagaaccactatataatttagcagtcccactactggatgtatctccaaagaagatgaaatcagtatgttgaagagacatctccacacccgtgtttaccacagcactatttacaatagccaagatatggatcaacctaaatacgcatctacagatgaataaagaaaatgtgatatatatatatatatgtgtgtgtgtatatatatatatgtgtgtgtgtatatacacacacacacacacacacacacacacgtacgtacataaatatacaatggaatactattcagccataaaacagaatgaaatcttgtcatttttggcaacataggtgaacctggagaacattatgttaagtgaaataagccaggcacagaaagacaaatactacatgatcttactcatatatggaagctaaaaaagttaatttcatagaagaaagtagaatagtaaataccagaggctggggaaagtaggaaagtggggatattgggagaagttggtcaaaagttgtagttagataggaagaataagctttggtattctattacacagtagcataattgtagcaaataacaatgtagtgtatatttcaagacagctagaagaaaaggtttagagtgttatcaccacaaagaaatgataaatgtttagagtgatggatatggtaattatctcaatttgatcattacactacatatacatgtgtcaaaaaatcacattgtacctcataaatatgtacaattatatttaaattataaattaaaaataaaaatggttaaaatgataaattttatgttacatgttcttcaacacaataaaaaattaaaaggaaagaatatgtgctctacaggcagacaacttagggtaggatattagcaatattagtttatatgtgactggccatgcatggtggctcatgctcataatcccagcactttgagaggtcaaggcaggaggactgcttgagcctaggagtgcaagaccagcctgggcaacatagtgagaccccatctctataaaaaatgaaaaaaggcagctgggtgcagtggctcatgcctgcaatcccagcactgtgggaggccgaggcaggcagatcacctgaggtcaggagttcaagaccagcctggccaacatggcggaaaccttgcctctgctaaaaatacaaaaattagctagtcgtggtggagtgtgcctgtaatcccagctactcaggaggctgaggcaggagaatcacttaaacctgggaggtggaagttgcagtgagccaagatcacgccattgcactacagcccgggcaacagagcaagactctgtctcagaaaaaaaaaataataataataataaagaaaaggaaaaggaaagaaaagaaaaaagggccaggcatggtggctcatgcctgtaatcccagcactttaggaggccgaggtgggtggatcacttgaggccaggagttcaagaccagcctggccaacatggtgaaaccccatctctactaaaaatacaaaaattagccgggtgtggtgccacgcacctgtagtcccagctactcgggaggctgagccatgagaattgctggaatctatgaggtggaggctgcagtgagccaagatgcgccactgcattctagcccgggcaacagagaaagactctgtctctaaaaaatgaaaaaataaaacaaatttatatgtgactttgaacaagttacttactctaagcctaaatttcctgatgtttaaaatgacaatgccacttccaacagatttgtcctatggcacaaaaatggatacggtaaatgttagttcctgcctttctctcatctaaattgccttcaaggctcatgccattgtgttaaacaccttcagtggtaagaaatctttagtctttaattatggattggaaaatataatcaactaaaagtgtgcaagctaaatttagtgaataaatgatagacagtttttagcctaaaagacattttgcagaaagaaccctatgagtctgagctacaccatgatcatatcactattaatttactttttggaaaaattctcacagaagttctcaacatttttcaaattattgtaggttaaaatgatggtctgtcattttaacctacactgtcattctgcctgcactgcatgcccctgacatgaacataattctagaatattaaaattgtccactgcagactttggtaacttgatttttggatgatatgagacacatgttttattagatgttactatttcttcaaaaaatatgattttgtcttattagaatcaactgtatgtgcctaaaacaatcacttattctgggttcttacaaaccacaagaataacaaaccattcattggtatagggtcatactttatagtatctttaaaatgcgctcaggataatatcctaaatttccatctgattttctcttgtcacaatataaatgcatgccctcttgtcctagagtctgttaataacagagtaagtacaactacaatttcgaagtctggcatctgaggatacttattaaatcatccttcatccttgccttctccaagttaaataatctaaattcctttgcttattcttaatatgttctatattttcaaagcccaaatcattatatgcaatattaagaaaataactattacatacttcacaacaataattaagaacaaatatagagttaaaattacagctatgtaaaaacagcaatgtgacaggtctaatacaattatgaataataaatggagacccagaaaaaatgtcattcatatattaattctacagcgtgattctacttctggcattctagagcacaataatccttaccaggggactttccttgttgtgagttgcttctgtgctctctgtatctggctggagtggctaaacctgtgtcttcactaggcttgctagcaggccccatttctgaaatgaggaatcccatctgttctgacggcaagatattctcacgtgaactggtctggcattttatgttggcatccacctaaaatattaaacccattcattatttgagatttcctccaaatatctgctaaaagttaagatattttatcagaggagttctattatgggaacatgatccaacaaacaagcttataaggcttttcattcttattattgatactatacctttctccctacacaaactattaaaatgtatatggagctaaaacatttacttatgatcagaggaatatctaccatgaagcttgttgatttttttttaacttacaaaagtacaggtttttttttttgttttaaggcagggtctcacattgttgtccaggcgggagtacagtggtacaatcatagctcactgtaacctcgagctcatgggctcaagtgatcctcctgagcagctaggactacaggtattagctaatttttaaaaagtttttttgtaggccgggcgcggtagctcacagctgtaatcccagcactttgggaggccaaggtgggcagatcatgaggtcaggagttctcgaccagcctggccagcatggtgaaaccctgtctctaccaaaaatacaaaaaattagccgggcgtggtagcaggtgcctgtaatcccagctattcgggaggctgaggcaggagaatcgcttgaacccaggagatggaggttgcagtgagccgagattgtaccactgcactccagcctgggcaacagagtgagactacatctcaaaaaaaaaaaaaaaaggtttttttgtagagacagggtctcgctatgttgcccaggctggtaactcctggtctcaggggatctttccacctgggcctcccaaagcactgggtttacagacgtgagccaccacacctgaccaaaagtaagatagtttcaccatgattggttaaaaccatcttttttctctgtagaatatgttctatcagacttcctctcctgttggaatggccataggcatgatcctgttagatggtttcagtgggatgtggatactttattctactaattttgtattctttctcttaaagaggccctcaaaattgtataagctttagcccctataaaatctatatctgccctgtttataaaatacaaatttctttctttcagacagggtctcattctgttgcccaggctggagtgtagtggtgtgatcacggctcactacagccttgacctcccaggctcaagctatcctcccacctcagcctcccaagtacctaggacacaggtgtatgccaccacaccaagctaatttttaaaatgtttttgtagggatagactctcactatgttgcccagaccagtctggacttcctgggttcaagcgatcctcccacctcagcttccaaaggtgctagaattacaggcataagctactatgcctagcctaagtttctttcttacagttcctaaattttctttggaatgtaaatccctttgtcaagttgatcaacttctgaaatactccatttctttatgaatttattttaaaataaaattatataatgaaataaaaagtttaaaacacagctttatatacatatatatacaca[144 bp omitted]gcctcccgagtagctgggactacaggcacccaccaccacgcccggctaattttttgtatttttagtagagacaggg[133 bp omitted]tgtgtacaagtgcagttttaagatctgaaatatttcagatgtgactatgaaggaacaaaga[141 bp omitted]ccctgtctctactaaaaatacaaaaaaatagccagcctggggggacacacctgtaatcctggttactcaggaggctgaggcagaaggattccttgaacccaggaggtggaggttgcagtgagccaagattgcgctactgcactccagcccgagcaacagagcgagattccatctcacaacaacaacaacaacaacaacaacaacaacaacaacaacaacaacaaaccataatgggcctatattttgtctactgaatttacaatattatcttaacacaatatactagatcttgacagtcaggctaaaaaaaaatgaggtgatataaatttaagacatttggatctaaaaatagagctaaaaaaggctgcaaaaaacaaaaacctgccaaaagttatcttgggactttctaacaatgaacagagtttcagtcctattgaagaaaaaatccaaaatggaaaaaaaatatatacacatatcaggctaagatcaagaaaaaaataaaaagtaggaaaaaatacttaattcacacacaaaaaaagattttaatttggggccaagcacagtggctcatgcctgtaatcccagcactgtgggaggccaaggcaggtggatcacctgaggtcaggagttcaagaccagcctggtcaacatggtggaaccccgtctctactaaaaatacaaaaattagctggacatggtggctcgcctgtaatcccagttacttgggaggataaggcaggagaatcgtttgaacccaggaggtggaggctgcagtgagctgagattgcaccactgcactccagcctaggtgacagagagagactccacctcaaaaaaaaaaatttctttttaatttggatttttttggtattattttaagaggcacaggtacagttttattacatggatatactgcatagtggtgaagtctgggctttgggtgaatagtgtacagtgtacccactaagtaatttctcatctccgttccccctcccactcccgcatccttccacgtctccagtgtctattattccacattgtatgttcagtgtgtacacattatttagcttcctcttataaaatgagaacgtgctatttgactttgtttctgtggatgtacttttgatgaattattcttactaattattcagaattaaagtttattcattttcttgtaataaactagtggcaataaaggaattagcctttaccttctgctttaggagtgcagatattagtaaggaaattcaaacacagtatgctcacaagttacagttcaatgatgctgtaataaagttagaaaagacttccaaccatctccttacctccatgctacaaatggctaggaaagtcatcataatatctgtcaaataaaccatccctcctgggtaatagaattatcagccaggcatatctaatctatccaaattaagataggaagcaaaaactcaagagatgtttataacatgaaaataagcttcatactacaacgctcaattagacaacctctctttagaggttgacttcagaccatgcataatatagtgagatgatgcttaagggttaaggtaacttctttctgaatcttttgtgcagaaccactgggacatgatcctcctggaaaccataatgaactggtattaaacccaaataaaatctgaacaaactctccactagaatagtctttagcagaagtactaggtactttgagctttataagcatttttttctttgcccccttacctggtgtgtgctgaatggtggcccttcctgcacaaatactactgaagatggagatggattatgatttaggtgctccttcagtttgacatgagcttgctggatggctgcagattcctgtattgtgctattttcaacaggctgagctgtgtggatggtatagatgtactcaggtgactgtggtagagagcaggcaactgcttgttctgttccaaccacaaaagacataatatctgagcctacaggagtaagtggctccagctggctagcctgacttgcagaacatggattgctgttgttagaattagctaaaatgtgttggcctctgtaagacggagatgttgggcactgattctcaacaggctccacctttaccatctccaatttaggggaggaatgcaactcatcaactatctgaaagacagcctctaggtttacttctgtctttgtattttcatcagtagtactgcagggccaattggaaggcaaaaattcaactggataggaggactgcattgaaggattctgggaaaagaaaaaatataactgtttggatagaaaataaaatatgagattaaggaggaaagctacaatatttaggctgatgagtgctaaacataaatagattaaacttaaagatcactaagaaaacctagacactaatctacttttcagcaatagtagcttcaaatctactgttagcatttacttagtatatactacatgtcaaccactctgctaagtttaatactccaatggtcaataattcttaaggttaaactgtacaaaatcaaaagctatagtacccaaatacctatttgctgataaagcatctatacaccaaattcttccataaaggctgacagacagaaacataatttgtatctatcatatactgtttcaggaatgcagtaaggaaatttcaaacacaggatgctcacaagtctaccaatccttctacagattcagggagcggtactaatattctgttccaaataatatggggaaaaatggatggaatatcaaatgtcctttgtttcctgggattatttatttttaataacaaagcaatagactaaaatggctgttgcttttagatttacatctttaagatatattcccttgtatatactgctttgcagagagtaggcatttaatacatgtttggtgataaagatctgtgaacataaaatacagaagaatgattaaataaaacatgtaatgaattgatgttgcacaatgaagagcttcgcacagagtaggcattcaataaatgtttgctgattatatcagattataaacttaaaatacagaagagttatgattaaagaaagtatgtagtgagttgatgctgctaaacacaatcattaacaaagattgtcaaagattttcagaaggccactaatgccaaataatgtaaattcaaatggtataagcactaagtgactatagccaatagcacatttattgagttattactatgtgccaagcacatgcaaagtgctttatatagatttcatccaaccttcaaaagagccctgtgaaatgtgataatctccatttcaaatgataaaactgaggtccagaaacttcctaatttacccaaagttacaatgaaataactgacagagccaggtttcaagcctaggtttgccgtattcaagagctcttgctcttaaacaatacaatgtactgactgtgcacgcacactctcacccatacctacagtccaactaaaccaactgcatttattttcaggatggaatctgaaacactttcccatttttctatttcaaaattttatgtgtgcttattgctattttcctatgatgaacacgtattgtctttttaaaattttttgttttgtttttgagacagagtttcacttttgtcacccaggctggagtgcgatggcacgatcttggctcactgcagcctccacctcccaggttcaggcgattctcctgcctcagcctcctgagtagctgggattacaagcgcccaccaccatgcccagctaatttttgtacttttagtagaaacagggtttcgccatgttggccaggctggtcttaaactcctgacctcaagtgatccacccacctcagcctcccaaaatggtgctgggattacaggcgtgagccaccacgcctggcagattttttttttttttttgagacagggtctcactgtgttgcacaggctggaatacagtggcacaatcatagctcactatagcctcaaactcttcaaactcctcaaggtgggaggatcgcttgatcctcccacctcagcctcccaagctaggacaaaaggtgcatgcaccactacatccaactaacccaccctttctctctccctccctccctccctcccttccttcttccttcctttatttcttttctttttttttttttttttaagagatagggtctcactcactatgttacccaggctcatctcaatttcctggcctcaaacaatcctcccaccatggcctcccaaagagctgggattataaggcatgacccattgtacacggccatatattgtctctataacaagaaaaggtctttataaaaatgttttatttagcacacaacataatcaagatataaacactgccatagtatctccagcatgatccagagaagagagtgcctggacccacaaacaagagcatctaactgtgggataggtatgtccctccagtgaagatgaatgggctaggatatcatgcttgatcatatcagccatgaaaaatggccagctaagtccccttgatctcattctatactccaaacaacaatctgattataatttgacttcctatgtagattttctccaaaaaaaaaaaaaagggaatgttcttttgagtaccctaatgccactagtaagatattctcctaagaactgagactatcttgaaactatcttggctagatgattatccaaggcaaacacacaattccaatctttggcagttacagcataaaaatacaaagcatggaatttaaaagtatccttaaaatagctatataaaacgtttaactccaagcaagtgtctcctaagaaacaatgagaagatatttgaagtaaaagttgagcatccttaatccaaaattctaaaatctcaaatactccaaaacctgaaactttttgagtgctggcatgataccacaagtggaaaattccagcagaaaagcacttaacacaaactttgtttcatgaacaaagttactaaaaatattgcatgaaattacctttaaactatatgcataaggtatatatgaaacataattagattttatgtttagactcgggtcatattcccaagatatctcattatgtttttggaaatattccaaaatctgaaaaaatccaaaatctgaaacactcctggtcccaagcattttgactaagggatactgaaccattatggtgtttacaacataggggctatggatgaagggggccaccacttaaatttctcatttttgacatttttctcctttctccttaaaaagaaaagtctaatttatctgtatcatcttggaagaatctgtcatttggtgacttacacacttgtagcgtttatctggtattcattttaccttggaaaaatccagaacagcactgtttaaaataactttcagcaatgatgggaatgttctagatctgtgctgtataattcagtacccataagccatatgaaactactgagcactcaaaatgtgtctacgttaagtatggaataatttttaaatcaatttaattttaattttaataaccatatgagactattgagtacttgaaatgtgactagtataactgaggaatttttaaatttcatttaattttaattagcttaaatagccacatgtggctagtggctactatattgaacagttctggcctagaagaattctgagatattatttatatcaattctctctttttttttttaagaattgagaaaacaaagcccattaatccacagcttacttctggttactcattaatataaaattacactttgaaattttgcaatatcgataaaattgcacataaagcgcggagcatggccacagttgcaagaatcttacctggaagtagttgcagtgtgcataggaagaggcagtgggagtgacacaactacttagagcatccatgtgggtaggagaacagcactgtagcacagctggaacaaattcaaacacagaaaagccatcaaccacaatacatttctatagcattcaaggagctcccctctttcaacatggaaagaaatccaaatttgaagaacttcttttgtatgtctaacaaaatatttagtccaattaggtggtgttatttattgaaaacaacacacacagtaacaaaataattttaaaggtctttaaaagggtcatgtctaatgtctatttttataaatcatttctttaacacctaagcattttgttacctttctaaccaaacatatattcttattgaaagtaatttcattttattgaaaatagaggaatatattgaaattccaaaataagtatttcaatcatttcaacagtaacaactatttggagggtggagtgttttaaaagagtaaaataactatgaagtattctccaaatgttccaccattaaacaatgcatccagtagaaatgtacacaaaaatgttttaataatttaggcaagtggtcaggaatgcagatcacagagccagactgcctggttttggagcccagctccaccagcctggctttacagcccagtgtaaatttgagcatggttaatctctgtgtacctcagtttctgcatcctattaaaatagagataataacagaatatagaacctaccaaatatggtggttgttgtgatataaatgagctaatatccataaagaacttagaagagtactggtacacagtaagcaaacagtaagtgttagctgctattattttaactgaagaaacacattttcaaaactttccctttatagtcaggacactgtgaaaagattgaactcttggtactagcaaagttacttacagatgcagtcttaataataggttgagtctgcttttttgtagagactctccagtataagtgagaatcagttattaatatcacaactgtggtttaaacagaggatgatgtacattgaacacccaccctattccaggcacagtagtaaatgctttacatacattgcctttacaaaacaagtaaactaaagctcagtgatattaagtaatttgccaaaagtcacaaagctggaagtgacagagtcagtaattaaactccaaagcacacgctctttaatataccacaatacagcgaggcatggtggctcactcctgtagtcccggcactttgagaggctgaggcaggtgaatcccttcagcccaggagtttgagaccagcctaggcaacacggtgaaaccccgtctctacaaaaaatacaaaaaacagccaggcttggcggcacatgtttgtagtcccagctactcaggaggctcaggtgggaggatcacttgagcccaggaggtagaggctgcagtgagccatgattgtgccactgcactccagcctgggtgacagagtaagactctatgtacaaaaaaaatttacatatatatatatctcacaataattccctaagctaaaccctgttcctgaaatgtaacatttgtagttttactagaattctacttgccgaatatctttaaaggtgtctttatcaataaggtggcaactctccctttttatgtccacatttttcatattttgagtgtgctaatctcattatttaatctttaaaggtaaattgacctaagaatttttaaaaaatagccgaaatgcttccctatttctccatgactattgattcttgaaacatcagaagttcatgaagatatactagaaataaatattttctctttgtatcatgagcaatttaaccattaaattttgcacacagaaagaaaacttgaaataatgggcaaaattatagttcagacataaatataaaggttattttttggatgactttttttaacaattttggtgactttaaaaggccatatattactaagattgcctcataaaattcaagctgttatcatttccaatacaggttagctgaacagttcttagatttgatcctttgaaggttattcaaatatatattttaaatgttttggatttgaatttgatttcccaaagtatttgacagcacaaatatcctaggaaataaattgaatccaaatagctaaacaccaagcaggatctgcagagcttgccaaaactcgggaagggaaaaaaaaaaaaaaaagctttttcccctagagttatagcagctaaggaaaatctagccacccagaagtagagaaagacttaggagctgcaggtccattccatcggggtaccaaaaagctgtgtttcattacaaataaatcaataaaaggattagctttattgttcggaagtttctgactccattggttacacattttgaataggtgtaaaaatgtactttaaaataaatttctcagagaaataaactacaatatataacagagaatatgttaatatatttttgatagcttgatagctgagttagtatctcaggaaacagcgaaaaagtaaatgttctttaaagtatccagtaacaaatggaaagtaaaacagtacctgtatgaagaaaatgaggatttgaatagattatactccaaaaagattcctcaatggctattccttaccactgtagtcctattttgtatagtcaacaaaatagaacaaagtattagtaagtttactgaatatgaaaacctaggcatagaaatttgactatgtgcctagtatatgaaaaaataatcaactgtgcattatgaaagcactgacatttataaaacttagtttatcactatgtcctaagatacattcatctgcacaaagaactttcagtgtcttcctgaaggcagtgttcagttgaggcattaaattccatgtagaaagaaaaactgaaaataattaaaagaattccatttcagatataaatataggcattaatgacattttcaaaaaatgtctaagtaataaaaaaatgttaagccagagttactaaaaattattgctcccgctataggtgaggcaaacaagttaatatactttatcctatggaagtgattcaaatatagaattaaaatacttagaatttgaatctactccagaatagtataatgtcaacagtgagaaaatacccaataatataaatgctcaaaagaaaaagcattataatagtatatttaatttcaagataagttcctatggcaactagaaccccagtatctcctcatttatggtgaggtaaagaaaaggtcttctgagtttataccccaaagtgaaagcaggcatttgaaaaggtatctgtacacccatgttcaacacagcaaaatttacaacagccaaaagatggaagcaactcagtatccatcaacagatgagtggatgaacaaaatgtgttacacatatacaatggagtattatccagcctttaaaaggaagaaaattctgacacatactacaatatagatgaatcttaaagacattaagtgaaataagccagtcatgaaaggacaaatattatacgattcctcatgtaaggttcctagaaaagtcaaattcataaaaacaaaaaataaattagagattaccaggggttgggggaaactattgcttaatgggtaccaagtttaatttgggtgatgaaaagttttggaaacaatggtgagggttgcacaatattgtgaatataagtagtgtcaatggattgtatatttaaaaatagttaagatggtaaacttggatgggcgcagtggctcacatctgtaatcccagcactttgggaggccaaggcaggcggatcacgaggtcaggagttcgagaccagccttaccaacatggtgaaaccccgtcactactaaaaatacataaattagccgggtgtggtggtgcacgcctgtagccccagctactcggaaggctgaggcaggagaatcacttgaatccgggaggcagaggttgcagtcagccaagatcgcactactgcactccagcctgggtgacagagtgagactccgtctcaaaaaaaaagatggtaaatttatatattaaatatattattccacttatatgagatatttagaatagtcaaattcatagagacagaaaatagaatggtggttgctagggacaacctctccacctcagggacaggttggcattctctaatagggagttagtggttagcaggtacagagtttcggttggggaagatgaaaaagttctggagatagacagtggtgatggtgaatgtacttaatgttgcaaaacagtaccctgaaaaatagttaaagtggttaagttttatgttatgcatatttttttcacaattttttaaaaaggtaaatatgattgtatttttgcttagtttctcctggcagaggagagagagagcttcctggtgctaagtgcctcttttccataagcacaaaatcaagtattttcagagaagcaatacagactgcctgagaacaagagtaacagcaccaaaaagctcttataattctatattctatatttatgtacattgatgtaggattagaagcataaagatcacacctatagaatttaaatgtactttaaaacaataatcagtaactttttttgcccaagggccaattcagaaaaatcttaaatgatacacacatacgtattttttaacctagaactgcatgccaaaatggatattttctttttctttttctttccttttctttcttttttttttttgagacacaatcttgctctgttgcccaggctggtctcaaactcctggcttcaagcaatcctcttgcctctcagcctctgaaggtgctgggctacaggcatgagccaccatgcctggccagatatatattttctaataaaaattaaaaatatcacgtgtaccttgggggaaagcatatattcttataaattctgttatttagcctttaaagtgttaatatctaggcttatttacttttttgagacagggtcttgatctgttgccgaggcgggagtgcagtggcgcgatctcagctcactgcagcctcggcctcccgggttcaagtgattgtcctgcctcagcctcccaagtagctgggactacaggtgtgcgccaccatgcctggctaattttttttggatttttagtagagatggggtttcaccatgttggccaggctggtctcaaactcctgacctcaagtgatccacctgccttggcttcccaaagtgctggaagtacagacgtgagccactgtgcccagccttctaggaccatttaaaaaaaacagctgttggacaggtacaatagctcatgcctgtaatcccagcaactcaggaggctaagcaggggatcacttgaggccaagagcttcagaccagtctggacaacaaagcaagaccctagctgtaccccccccaaaaaaagtgttttaattagctgggcatggtggtgtgtgcctgtagtcctagctacctgggaagctgaagtgggaggatagcttgagaccaggagttcaggctgcagtgagctatgatcatgccactgcactccagtctggtgagaaagtgagaccttgtctcttaaaaaataataaaaataaaaataaacacagcttttaaaacacttgatcctttacatgtaaatagtgtttaaattttacaaagcctattcacatatattaatttatttaattcctcactcaaactattaaggccactttatagaaagggaaatgaggccacataacatgatataatccactgaagttcatatccaatgattaactgcaaacctgggactagaactagttcattccattcaataaattatttacttagggcccattacagcaagcactatgctaggtgtagggggatacagaaatgaattagaggcagccccactccccagagcccccaggctgaacctcccactctagcaattggagtacattctctctactctggtgagtcaataacccagagcaatcccaatgccaccagcagcataaaaaggtagattcccctaccaattgctgttgtccaccctatctgggaagaactaactctgaggaagagatataccagaaaaaaattatctcaaaaaaacaaagcaaaaaacaaaagaccctcttcatgagaggcaggcagacaggcaggggggcaggcgagcacagtggccaaaagaacagactcttgagtcagattgtctggatttgtttccaagcccacagcttcctagctgtgcctcagtttcctcatctttaaaatgaggataattacactattttataaaagtattataaggattaaatgagtgaatatttaaagagtactaagaacactgcctggtcatagtgattactatataagtatgtgttaataaaaaaagagatgaagggcagctacaaatttactaaccattgccttgagtttaaaactttgaaaaaaaggcaaagttgattttgagtctattcagcattaaagaaaaacagttctcaatataggattctatatataaagatgaatattcttaagtatgttcaaatatatagtggagaataagtaaaattaaaaggtttaaaatgaagtttttcataaaagaggaaaattaaattacagttgcagaccaaaaataacatcagaggaaaaattgaattctagataaagcaagaataaaaagagtcaactaatgctggatctacaaaatcttgcctttgaagaagtggtaagaatggaaaactgacacttcaagggaaaaacaacaaatataaaaaatgattccagtctgcttctaacgtgagaaagaaaaaaaatgattccaatgagtcattttatgagttagtctgatggcaactttttagtttcaatgtttgactttactaaagaaattaacaatttatgaaatattataaaattcaaaatttactggttatactatttgaagaccagatccaagtttatttttataacacaattttttttttttgagacaaggtcttgctcgcaatggcacaatcacggatcactgcagcctcaacctcctgagctcaagcaatcttcccacctcagcccccaagtagctgggactacaggtgctgccaccacacccagctaatttttctatttttagtagagactgtgtttcaccatgttggccaggctggtctggaactcctggccttaagtgatccacccgcctcgtgagaatgatactctatttaattttggtaaagtcatttgtaatactcttcataaataagtactcactaaatattggttaaattgctcactactttttatttccttcatccataacttggaggaattaagtatttctagggtatttttatggcactttcttttccattgcaagttttttgtattaacaataaaatttttcatttacaaagtacttcagaatgctcaaagtagttttgcccacattatgtactagaagtcatcatgagatttcttattctcataatctcagaaactttatagtcatttcaatcatccctattaaagaagacaaaacaaaaattcagttaacacaaaattctctatatactgtatactataaaaacatcagcagcacttacttgttctttttttaatgcctccttcctaattcttaccttaaacacttggagacaactcccaatttataatttacatcaagctaaaataaaatatttttaaaacagcatgtccaaatttaacaataattttaacaaacagcagttctataataaatattaactataacatttgtagtggttttagtgaataatatatgagtacttttcataaaatttagagccagtagtttccatgaggattgcttgaaacttggaatacattttcaggctggaatgcagtggcacaatcatggcttactgcagcctcaaactcctaggctcaagcaatcctccacctcagcctcccaaattgctgggattacaggtgtaagccactatacctggccatcttgttttcaaagattgtgcatatattttggttcttcaaagaagtagctgggcaaatctgggggaaaaaattaggccttaaccattttctatgtaacatggtaaaaaaaatttttttttaatttctaataggcaaaatgattaaaagtccaaaatcatccttacttcatgtaattccctccttttcttttcaacgccattcaccaaaagagtaacagctctgaaaatctataaaactcaatctagatgattttaatatcattaaacttaaaacattttgggaaaataatccctttcactgctatatttaggtacaatgagccaacgatacaagtatatggttggatattaacagctagaaaatagtgagtactattaaatagaacagtcaccagatttataattttgttttgtgtgtacacatttagttttatcgtaacaaagcagcttgtccacttttaacctttaaaactgagcatcatctttcctttccagtgaaacaaaaagaaaatttaaaaataaacaggataaaaattacaatagagaatgtcaattccaaataagatcctacaggctctgcagattctcccattgagtggcagggctcaagtcatcattagcagagaatttattttaaaaagtgtcaaattgcaaaggatatctgtcaaatatcacaattaaacatgcaaaaagagaagccatgttgtcaaaatgcccacttaacccccccaaacatctcaaacccaccctttggtgaccttctataaacacattttctaagattttgttttgttttgttttttaacaagagaaagtagacagatacatgttggtaaatgctaaatgttttcattcagagaaaggaggagaaaagctagaattctgggcactgctactcaggggcctcacatcctccagcttccagcagagagaagggaggaagtttttctttttttccacagagctcgtagtgttgattccatacagtttttgttcagacaagaagggataaaaatgaatttcgaacagaaaggggtagagactcttttccctttgtattctgctcaaggtatttccccccaaataagttgagaatcatggtgtagagaaaagagacctcaagaacagggtgactgagcacaagaggaaaacaaacaaaaaaaacaaaaccaaaaaaacctgcaacttgctcccaaggactggagaaaatttttaaaaaggaaggtcagaatccatcagtgttctattagtcatcttctccttcatccttctctccttcctccccttcatcatcatcttcatcttcttcatcttcctcatttccttctaatcaatatcttctaatccttccttctcttcatcatcatcatcttcttctccttcttcatcatccatatcaggaaccaagtggtactgtaatgggtttggccaaataccatctttgatgacctctcctaactcatcagtacctgcatcagaatggtcagtaaatcaggtaaagaagctccctggttcctcatgctgcctcttcctgccggctttattctgagtttaacttgaacgctttgtcaaatccattccagatttccatttgatttcagtggactttgaagatggatcaccactcttattcagatgaaattctttggacagaactttattttcaaggtaaggattttgatcaaaataaaaatctattctgtaacctgatttaatatcttcgaattctgtcacttcaactctggtcaaataatgcagtgcctcttcgtcctcctccccaagcagtgcagacacttgtggatggttgacaaatgttgttatccaaaaatgtgggattttggcgatcaattctgatctcttctgaaaaaaatggttggcggagtttgttatatttctgttctactttcaaaatctcctcactggcttgttcattaagtctgtctatttcattttggatttcatcaatgtgttcaattgcttcttgctgttttttttttcctgaggtctcgtcggccctgtagtggttggagttgagctcctttttactgattttggcagcggacgcccatgtggcacggttgggagacgggggcgggggaagggaaggctaagggaacaggcaggcagcttccccctcacggcacacgcgcgggcgcttgctgggtccagccacctcctcccagcgctgccctcgcggcctgacgacaggtatgggctagggatatatatatatactttttttttttttttttttttgagatggagtcctgctctgtcacccaggctggagtgcaatggcgtgatcttggctcaccacaacctccgcctcccagattcaagtgattctcctgcctcatcctcccgagtagctgggattacaggcacccgccaccatgcctggctaatttttgtatttttttggtagagacggggtttcactatgttaaccaggctggtctcgaactcctgacctcatgaatcgcccgcctcatcctcccaaagcgctgggattacaggtgtgagccaccatgccaggcccagatttataattt[144 bp omitted]gcctccccagtagctgggactacaggtgcccgtcacc[137 bp omitted]gcccggccactccattcccttttctaatttacatttcttctactttaagtaaatatcttttttttttaatatttaaaataaaaaaatattttagctttccctttagtgccgcctgggagaaatggtctaacaaaagacctccagaaattgcttccagatttacataactgaaaaaattaaagatcctagattattaattcacagggcaaaggaatgccccctttcttctctttctggtcttttctggaatgccccctttcttctctttctggtcttttctgaaagctttgacccttgtcttatttctattgcctcatttcatcattgtgtaaaaagcataccacatgatgaaatacatgcc[141 bp omitted]aaaccctgtctctactaaaataaataaatatatatatatatatatatacacacacacatacacacacacacaattagccgagagttggtggcaggcgcctgtagtcccagctactcgggaggctgaggcaggagaatcactggaaccaaggaggtggaggttgcagtgagccgagattgcactactgcattccagcctggcaacagagcgagactccatctcaaaaaaaaaaaaaaagaaaagaaaagaaaagaaaagaaaatacatttgagtgaaatggtaagattatattgcaaaaagttttctattaaaaaagaaaaaaaaatggccaggcagggtggctcactcccgtaatcccagcactttgggagcccaaggtgggtggatcacctgaggtcaggagttcgagaccagcctgtcccacatggtgaaaccctgtctctactaaaaatacaaaaaattagccgggtgtggtgatggacatctgtaatcccagctactcaggaggctgaggcaggagaattgcttgaacccaggaggcggaggttgcagtgagccaagatcacgccactgcactccagcctgggcaacaagagtgaaactccatctccaaaaaaaaaaaaaaaaaagagaagaaaagaaaagaagaaaacacaacttttttttttccccaagaagcaaaaaacagatgataactatcataagcgttcccaattagtggcttgggatctaccagcgtgttctcaatgcccttgcttgagttccaggtcagttgtcattgtcaggtttctccttctctctgctactccccagttcttagctgcctaggaataacactgcggagatcccactgttcaccaggtttttactaaagaattcaatgttcagagagtatcctttttcattaaatatcattactgagatactaaatgatttcattatgaggtaatctcaccttaagattaaaccatattaaatatataataaacatattaaaaaaaaactacagcaccaagtacagagttaaaataaggttctggggtactaaggttttttgctttttgtttttgagacagtctcactctgtcgtccaggatggaatgctgtggagtgatctctgcttactgcaacctctgcctccgaggttcaagcaattttcttgcctcagcctcctgagtagctgggattacaggcgcctgccaccgtgcctggctaatttctgtatttttagtagaattggggtttcaccatgttggctaggctggtctcgaactcctgacctgaaatgatgcacccgcctcagcctcccaaagtgctgggattacaggtgtgggccaccacatctggccttggggtactaagtcttaatttcataactaggacatattttgaatatacaagtttcactaacaatacacacctttatacatcaacaaaattttcacaatccttaaaaacacaatgaaattttgtatattgtttaaaaatatctcctgctaagaaatctttgccatttcttaggtgtacattcctactgtttgtgttaaagcacatagacattaaaatgcatttaaaatatatatatatgctcattataaacaaccttaaatagaaggccatgaacctgaatttgtcatacctgttggatagtaggcttgcgagtactgtgctgagggtgtgtagttactgtatttttgggaggagctgaccattgtttgaggaccttgttgaacatgtacagatgtggtgctgggctgcagtgtataggtaacctcagttggaaacctctggagtacaggaaacggaacccctttatctgaaaatgtgggagatgtctccacttgtccaggatgcattccaagggagttctgccatattctatgaggaactggggtccgatctaaacctttcagagggtaagtactgtggtcgtgggatggagttgatacacaggagtaaggagacaaactatctcgacgaaatgaccggtgaaattgtcctacagccactggtcctacataaaagaggaagagcacatttactaattttgcattacatcaccagacatagtaaaccaaaggtcataaaatatgctactcttcacctatcagccatttttaacacaacagaagtttaggtttggtaaaaacaagttcagaatcaagaatatgagacatataatgctgaaagaagaatcaaataaacctttgttttctcagtgcgatagtcataaaagataaagtgcccaaattctaacattaaatcaaatgttaaatcaaaaattcaacattaaaagccttttatacatgatttggccatcttacctttcgctttatttgcctgacccagatttttccaacgtgtaagctacttcctaaaagttttccattcagtctttcaaacaattttgtaacattaataataggcataaaaataagctctccaccaaaaaataaaagaaatgggtgtggaacatataacaagataaaaaaaaaagtaacgctctttgctatctatctatctatctatctatctatctatctatctatctagcaaccgggtctcactctgttgcccaggttgcagtgcagtgatgtgatcttggctcactctagcctcaaacttccaggctcaagcaatcctcccacctcagcctcctgactagctggaactataggtgcacatcaccaagcactgtttattttactttttgtagaaacaaggtcttgccacattcccaggctggtctggaactcctgggctcaagcgatcctcctgcctttgcctcccaaagtgctgggattacaggcatgagccaccatgtcttgccctccctttcaaatttttaaaaatgataatctttataaaaaagtcaggcttgaaaagtttgacttagtttcctccttcatcccttaaatcaatcaatcattttccatgatttttctttcttcagagtctttccagtagtatcctttcccagatatcagtggctctcaaacattggtttacatctgaatcacctgaagagtctgttaaaaatccacaaatccaggcccagagattctgatacttgtcttctctttattagcaatgtaaaaaggaataaaaagtggagataaggaagagagagaaagggcaatagtatgtaatgagggaagggagaatataaatgatacagaactatggattatgattcttgaacataaacaaagctagcctaatttattcctaaggagagttttgcattaaatcatgtgactgattcacaagttcctttcaatttactaagctaatctgtaaaacggagggaaaacttattatgtgctactcaagtattaaactacacgttgaaagttaacactcaaatatctgcttttccaaataattagattgtaaacccattcaacaagttacatatctgtcattctatttctgtagtttaatttcctttaaagaataaagcacgccagccacggtggctcatgcctgtaatcccagcactttgggaggccaaggcaggcagatcacttgagtccaagagttcaagatcagcctcagcaacatggtgaaaccccatctctacaaaatatacaaaaatcagctgggcacgatggtgcatgcctgtaatcccagctactcaggaggctgaggcaggagaatcgcttgaacccaggaggtggaggttgcagtaagctgagattgagccactgtactccagcctgggtgacacagtgagaccctgtttcgaaaagaaataataaagtattattgagtccaggagttcaaggttacagtgaactatgatcgtgccactgcactccagcctggatgacagagtgagatcctatctcttaaaaataaataaataaataaataaagcattaatgccaaaaagaaacaaatacgcacatatgaacaacacaaattctgaagccctggaaatcaagaggctttatctaatagggggaaaaaatcctacttcagaagattgaatgtattcaaatgatagatctcttaaaaactatttttcctttattcctttaaagtacaaaaaataaaatagaccctgcgcagtgtctcatccttctaatcccagcactttgcgaggccaaggcgggaggattgcttgagctcaggaatttcagaccagcatgggcaaaatggtgagatcctggccaggtacggtggctcacacttgtaacactagcattttgggaggctgaggagggcagatcacttgagcttaggagttcaagaccagcctgactaacatggagaaaccccgtctctactaaaaatacaaaaattagctgggcttggtggcacacaccttgtagtcctagctactcaggaggctgaggaaggagaatagcttgaacctgggaggtggaggttgcagtgggctgagatcacgccactgcactccagcccgggcaacacagcaagactccatctcaaaaaaaaaaaaaaaaaaaaaaaaaaaggaaagaaagaaaaaagaaaaaaaaggtgagatcttgtctttacaaaaaataaaacaatcagccaggtatggtggcatgcaccaatagtcccagctaggagactgagatgggaggatgacttgatcttgggaggtcaaggcaccagtgagccatgttcatgccactgaactccagcctgggtgacagagggagactctgtcttttaaaaaaaaaaaaaaaaagcataaaacagtttttacgctgcttgactagcaattccgcaggtacatacaccttgaacccaccactgacaccccctcctttttttctctctcttcacaagaggtgtttctgcatgtccaaaattacccattccctgatttctcctgggatgctcgcagtcaacactacatacagcctacagagtacaacagctctgccctcttcggggataaactgttggtgaattttcaggctgtcaataacttaagcagctaattaaagaattccctaccttaaattgttttatatctgtctacttctatcatgataaacttggagtgatggccaattaactattttagatgcagttaaaattagaacacagtcaagattaaaagaacattcttttaagtctgtttttttaaaataaagaaccaagacatgtttagcccttatttattcttctgttaagggttacttcatagggctcaattcagatcaacattacagagcatcacctatatgtcttcaaaatatctttaagatatatttggcaaagtttgaatccagaattctggaaatagagggcaggatgaaattgtgttctcaaaaattctatttcttttatggaagtgcgtctgaattaatcaattcccaggaaagaatccaaaaacttgcctcttgagagcatggtatccccaggtaaaagattatccacttctcagatctgttacttagtttaggatattttaacaaatatcgtataaaataaactgctcctaaaaacaaaataacaaaagcgcacaaaggaaaaacatgcaatctgtttcttatcaagtatactcttggaaggtgaacagtgcaattggttcagtggctctaaataaaagaactaggtcctaaaacagaggattctattatagagagagaagtattcaacccatacactgaaatagaacatagaaaaaatggagactaagcagtagcagtgtagtcaggcacataaccaaggcaagattcgagaagaagaaaaatgagatgaggaaaagtagaagagccaaggacttagaacatggaatgagaacaaaacaaagttgtattcttgaataactttgctaaattattcaagttctaatattcttgaacttaaagcagaattacattccacctgaaccagtaacacaattccctagtgaaccaaacctatggtatagacagtccacacctgacataccttctgcacataccaacaggtagaatggtaaggaaaaaaaaaaaaaacaccaaacaggaaaggcatgaaaacaataacttagttatatatggattgacatataatctatactgaaaaaccatgaatttatgtttttcaacaaacagtaatctttaaatgctgaccaactgaagtataagtgaataaaatcagatgccagatggccctgaatttcttcaattaaaatggactctatccttaaaatacaactgagtttaagatagttgagggtaaaaggtcagagaagagaaaagagcaagtgttggtttttatgtgtgtgtgtatgcatggatgtttctttgtttgaagtggttatcccatttctcccaaaaacatattttctagtcttttctccttatacccaccagacatgcaacctgaaaaaaaaaaaatccatgtcagagattctgccaaatgtatgccatggtattgtctccattgccttgccccctatcattccctaccaaaatcaatggccatcacatggaagtggcctaatattcctttaggacattcttatgccactgctgctttttcaacttactgttggaactttaacctaatcccttatcttctaaactccacagtggtcacataacctagttccttatcttctaaattccaaatgaaccaagtactgttgtcattcataaccctgggcgaaggttaagttgaacatagtgtta[132 bp omitted]ctgcaacctccacctcccaggttcaagtgatgctcctgcctcagcctcccgagtagctgggactacaggcacccgccaccacgcccagctaatttttatatttttaatagagacagggtttcacc[138 bp omitted]atgtttttatttactctcctagctgaaggtgaagaatgaatgaatgattacaccctgttggtttcttggtatactgcttcatatcatggactctttaaacagagaaatggaatattgccacccttgccttcctggaagagggggaagagcatcaaaaatcaagtctacaggcctggcgcagtggtggctcacgcctgtaatcccagcacttccagaggccaaggtgggcagatcacttgagcccaggagttccagaccagcctgggcaacagagtgaaaccctgtatccaccaaaaatacaaaaaattagctgggtgtggtggccacgcctgtagtcccagctactcgggaggctgaggtgggaggatcccttgagcccgggaggtggaggttgcagtgagccaagatcttgccactgcactccagcctgggggacagagtgaaaccctatctcaaaaaaaaaaaaaaaaaatcaagtctataaaataatttggccatgtgaagtggctcacacctgtaatcccagcacattgggaggccaagatgggcggatcacctgaggtcaggagttcaaaaccagcctggccaacatggtgaaaccccatctctactaacaatacaaaaattagcgaggtgtggtggcaggcacctgtaaaatcctagctactctggaggctgaggcagaagaatcacttgaacccgggaggcagaggttgcagtgagcggagatcttgccattgcacgccagcctgggcaacacagtgagacttaatctcaaaaagtaaaataggcagggcgcagtggctcaggcctgtaatcccagcactttgggaggccaaggctggcggatcacctgaggtcaggagttcgagaccagcctggccaacctggtgaaacctcgtctctactaaaaaatataaaaattagccgggcatggtggcacgcgcctgtattcccagctactcaggaggctaaggaatgagaattgcttgaacccgagaggcggaggttgtggtgagccgagatcgcgccattgcactccagcctgggtgacaagagcgaaactccgtctcaaaaaaataaacaaataataaaaaataaataatccactatcacagagggtttcttaacttttactaaatacagatgtataccaaaaagttttttcaatactgaaagattgtagccaatagtgaaaactccaaaggctgtaaatgtgagctttctaaaattcttttttaactaaaacttgacagctgtaaagaaaaccatctttgccttatgtttgtctaatcatacccctttaaggaagcatcaagctctaatttgcttcaatgaaagaaatgtgtagccaattcattctacataggaactatatcttgtaagccacgatgtatcgttgtatttttgctcttaaggtatataaacaacgtctaccattctacacattaaccagaaccttaaatctgatgattgtcgtagcacttctaagatttcttagatgtgccaataggtggaaggtggcagccctcttcaaggacaaatttccactgcaggcaccttttccaaaactttcccttgcctgctattgtaatgttctaagttctctctttttttttttttttttttttttgagaccgagtctcgctctgttgctcagactggagtgcagtggcactatctcggcttactgcaacctctgcctcctgggttcaagcgattctcctgcctcagtctcctaagtagctgggattacaggcgtgcaccaccatgcctggctaatttttgtatttttagtagagacg[148 bp omitted]ccgccttaacccgtagggtgactccactctgcttcccacgggagcaaaggagccccttttgtttcttccagacccaatgtttcaacgaaggactactgagtccacatgtttacagtggacagtgtgggtctcaggaaggtaaacggaggcttacaaccaggtaaactcctggggttcaaaccggggacgagtagaagggagcctaagaggcggaggtcccttttgctgccagtgggctcagaaggggccgaatgcttacggaccctccaggggagggccggtggccaccgtgctggtgccgctgagaacggcggcggtggcgggaccgccagtctcgggaagcacagcggccaatgggtccccggcgcctttccgacgcccatagcgtgaggacgtgcgaaaatgcgccctccagcggcggttgctccccgccgcccatgtgcccactgtgggcgagggcacgggcagtccggactcaccgtgcggctcgggccggggccccgcgggcggcggcggctgctggtgctgcagtggcgcggtggcggcggaggccgaggtgatgagcagccgctggaagcggttgggcgggcggcagggcacctccaggccggccgccagcttggccttgttggcgctggtgaggcgcttgaggtgcacgagcagctgtggctggtcgcggcggaagtgcgggttgtggaagtgatggagcggcccattgcctgccggtttgccgccccccggcccgcccagcaccaccttgcggaagccgtagaggttgagctggcggatgaagctggtgaagctggtggttttgaagagctcgggctcggccccggcccccgcagtcccgccaccgccccccggcccgggcgggctgagcagctcggcctcgaagagcggctgatcgataagcagcccctcgccgcggccgtcccagcggatggagcggtagcgcgggctgttcaccaggcgccacagcttggcggggaagttgttggggttgatgggggtggagagcagcgcctccatcgccccgccgggccggggcctcgccccccgagcctagctctcccacaccgttctcgatccctccccggccttcgcctcgccctgcccgctcctgccggcgcccatccgccgcgtaccagggaccgttggcgcacgaggccccgcggcgcctcccagcgcggccaatggggcctcgagttcccgccacgcggcgtgggcacctccccctcggcggccgcgtgccccagctcggcccgccggacgcctgcgggacccgggcaggagccccttccccaggcgttcccagacttcaggccgggaaggctgtctgccggggtgttctaagtcctgacaagagagaagcccagttatccaccgtggaataccaagaggcgtgtgtttcggcccagccaactagtggagacttggaatgcagagaaagtgtgcgttaggcagcagagttggtcgttctggggaccaaagggtctggtctgtaatctttgctaacagtggaactgcttacctctcaaacaaaaatgatgctactggaggtataatatcttgagtaaacgaactcaccttttagatagtagccctttgtatcttttaagatacactcttttaagtcagtatttgttcaagacaatttactcaaggttagatgaaaactgaggtccctaggaggagggaatcacaagaatctaagtactatcttgtgtgcctgcccaactagctggtggcattttagacattaaagagaaataaagatgggacagaattctacggtatccataagaatcgatccctagccaatcaataaataagaatgtaacaagagctgtgctgattcaaaaagagaggttcatttgaaaacggaaattggccgggcgcagtggctcatgtctgtaatcctaacacttcgggaggccgagctgggtggactgcttgaacccaggagttcgagaccagcctggccaacatggtcaaaccctgtctctactaaaaatacaaaaattagccagcgtggtagcatacctgtagtcccaactgttcaggaggctgaggcaggagaatcgcttgaacccagaaggcggaggttgcagtgagccgagatcgcaccactgcactccagcctggggaacagagggagactccatctcaaaataaataaattggaaattgctgggagaaaggggtacaatgttctactcttctcatggtcaaagaataagtgaatattaagtttttttagaaatgaaaataaaacgacccaacaaagcagcactaatatagagattttatttaaactgtattgaatttttacagcacattgcatgtttgtcacaacgcaactgcacagtttggatttttggccacatcatgtcacttacacccacaacagctctgaaaggagtatttgatgaacacatctgagccaagagcccagagtctctctccaaggccatgcagtttgttcactgatgggacagtccctcaaaacagccacgctaagtagacagatacagtctccccaaatgttaccaatcttactccccttgaaaacaggcagagtgaagtgcaatgaaagacaagttaattaaaaagccactcacaactggcagtaaattttaatgattgataaaatgcttaaaataattttatgtatcagaaacaaggaacagcttgttactttttcaatgatctcaggaattttgcagacacaaaatctccattattcagctccatttaaatgaaaaaaaaagttccgctaggctgacctaaatatgccaaaactttttaggttacatctatggcaagtacaaaagaaccacagatgcgtctctgtaggactgaaaaggtcaggacaaataatgattcttgttctaaatgcagatcctagttattttggaatgaaatgctgttttctagaaagcaacatgaaagtagcagtaagaaagatgactaccatcatttcaaaacaggataagcctaaatataatttaccatttatatgtcaacaaattaaggaaaactgtataaagtcctagtggtttcattataggccaaggagactgtatctgtcccacccacagtacatggctatatcactgtatcttttggttaagtgccactggtacatattaagatgaaaaaaaacaaaaacaaaaacaaaaaaacaaaataaaattttttaaaaaccaacaacgtttggtccaaatggacacatgttctttcccaattttggtatcaaggctttattctcttctgtttgggttccattgttaagtgcacagaaatagacagcagcatttgtactgaaaccctcacataccaaacagcatatgctaggaggtaaaaaccaaacgctaaattctaccctcaaggtgtcaagtgttcaggataagaagcaatgtgacccagaggaggcatcagccaagggaaagacaacatgggggaaatgggcaatggaacaacaacaacgaaaacctttgttttattttcatgccaggagaggatcaaggtgtagctcctgtgttagcaccaggacaactaggaaaagtcaggtgcaaagagtagggcacaatcagcagatatttcacaaggataatttttgcttttcccttctcattcttcacagtgcataactcaagagctgccactgtgtaacagagacgactgccttcacagctcaaaataactcaatgtttgccaggaccgaacatcagcagagttttcctctgctcccaaaaatgtctcactccctagaactgttcccctaaactgaatattcaccaatgctggctgatgagccaactgaaaaatacattgaaacctccacttgctgagccagtcttcaaaccaaactccacagaaagacagtactaatgcaactagaaggagtgcctctaaaggctgagccttcatgcagacacagagcacagaggtacaggatatagttcatctcaaataggacaggaattcctaccttgtatactataatctgcttttgtcaaggtggaggagagatgggtctggttatcacttggagtttggttatacatatgcctttctattgctgtttggggcactttgcaccaggcaacatctacgcaatcatcatcttgtgacctccaggagaaagaggctggagtcaccaactcaacattaagcttccagaccctgggtctgggttaggaccattaccccaaggtgagggtatcaccagtagaggacctcctgctaaattgcaattcctctgctccagtttcatgataccaaggaggatttctcaagatggtatctctgagctctgtgatttcatgagccacaccaaggaaccttccaaactacaactgaagaagatcctcccttcaaacctgctaaaattggacaggtttctccccggcattcaactggaagctgtagcaatgggtttcttcagctgttggctcatgagttccctggcacgagagacttgaatgtgttcgtaacatgagttacagacgagaactgggtcatagagttgctgatcaggaatgggcagcttcaggtggcagcatccagcacaaaatacattcccacaatttctgtcaaagcagaaagagggaagagttcatcagaaatgccaatatactggccaggcagggtgactcacaccagtaatccctgcactttggtaggctgaggcagtagaatcgcttgaggccaggagtttgagacttgcctgagcaacatagcaagagcccatcgctaataaaaaaataattaattaattaatattaagaaatgccaatatactgagaatgagtgatactaaatgaaaagttggggacaaacaaaaatagtttctataaagaggtgtccacttccaaactaattccacttagttctatacatatgtattacactatttttgtttttgttttttgtcctttttgagacagagtcttgctctgttgccaggatggagtgcagtggcgtaatctcggctcactgcaacctccagctccctggttcgagctattctcctgcctcagcctccagagtagctgggattacaggcatgcgccaccacgcccagctaatttttgtatttttagtggagacaggttttaccatgttggccaggatggtctcaatctcctcacctcatgatccgcctgcctcggcctcccaaggtgttggcattacaggtgtgagccactgcgcctggcctgccctgttttttgtcatactaaatcatacaaaacatcttacctgcaatggtgtcttcgtttggccaaccagaattcacagtcacagttatagcagtgtgatgccatatggtctggaacccagcgagtcacctaatagaaggcacaaagaaaaattcctggtccttgttgacagactggaagagcaacattgcaatgaggaaagcaccccagcagaaagagacaaggcttatcttcataactggctaccatttgcctaccaggctgacactcctctgggggacagctcagtctacagcatgtcattcatctctggaaaatatgatgactcactggctcacgtaagtacccaccacatatgtgcctaaacatacctcagtctctttcttatcaacaggttcccagcttgcttctgaaaggcagtcttcactgtgatcagagccaaaatcctcagtatcactgccatctgactccttcaaacatgtctgatgaaaaggcaaagacaacaaattatcttcatcatcattaacgcttactgtttaccatgtgtcaggcactgtgctaagtgcattacacacatgaacttatttcttatgacagtcttacaatgtatactactaatatccccattttacaaataagaaaatgaagccacagagaaagagctgatacgtagtaaagctgggatttgaacctagtattgtagcttcagatttacactcttaccgatatgctacaccacagcatagaaagactcttgttatgttctaaaccaggggttggcaagctatggcccacaggccaaactagcccactgcctgtttttgtaaatcaggttttgctggaacacagctgcattcattcatttacttactgtctatggctgctttttgttttgtttttgagacaaggtctcgctcttttgcccaggctggaatgcagcagcatgatcacggctcgctgtagcctcaacatcctggactcaagagatcctcccacctcagcctcctgagtagttgggaccacaggcgtccaccaccatgtccagctaattttttgtaatttttgtagagatggggtttcaccatgttgcctaggctggtctcaaacttcttggctaaagcaatccacctacctcggcctcacaaagtcctaagactacaggcgtgagccacagtgcctggctacggctgcttttgcacaatagcagagctgagtagttgcaacatagacggtatggcccacaaaacctaaaatagttattatttggccttttacaaaaaaaaaaaaagtttgctgactcctgtttaaagcaccagagaagtgagaagcaggcaagtggggagcaccttaacagaaggaaggaaagtgtctgtgtaaatggcaagataccatggagaggaagctggctcctagaagctccccaaggactatggtgccagaacctgaggctgcccaacactgcacagcctatagtcttcatctctcacctggattattccaaaatgaccttaccagcctcccaa[141 bp omitted]agaccccatctctactaaaaatacaaaaaaaaaaaattagctgggcatggtggcgggcgcctgtagtcccagctactcaggaggctgaggcaggagaatggcgtgaacccgggagggcggaggttgcagtgagctgagattgcacgactgcactccagcctgggtgacagagcgagactccgtctcaaaaaaaaaaaaaaaaaaaaattgtacattgttgcaagagtcattttcttaaactacaactctgatcatattgtgcactggcctaaaattttattgccttaagggtaaaatccaaacaagaagggcactcaacctgacccttgtaatctccacctaattctccaatgtcacctcccaccaccctatttgactgtctctcatagccccagtgtaagcgtgtatgcatgcatgtacacatatatactcgcatgtcccatctttttaagccatatcattggagtatctattgccactacgcttctgcaaatggtgttttgttttcactgtctacctggctaagtatcacacattcttcagcactcagctcaagcattaccttctcaagaaagtcttccttgacgtttcactccactccagccctctaacacctgatgcctcctcaatcatagcacttaaaaacatcattctaattgcttacttgtttttcatcctatagcccaggcacctaactcagtggcacacagcaagtacccaacgaataaatgctgaatggagggaaggctggatgaacagagtaaataatgggtgtatggcagttggtgactacttacaaaatcatcctcatagtccatggggggctctgctggaggggcacagcagtgacggatgtccagcctcatctgaagctcacgcacctgtcgacgtagctgctccacctcttgtttgtaccctgcttcgatttgccgtaacctatgctggatcacatccgtgggaaaggggagtccatcatcatccaaatacagaggaggcactggagaagggcagttcagtggaacgggctttgtgctagagacttgctttggatgactggacaaccacatctggttctttcctcctgggccagtacaatgtccattggaatgactagaacagacaggtgacttcacaccttctctctgagcccactggcccccaaagcagggccctgtggcccgcatctgcttactgtttggcctcttgctacaacagccataggaaagcagccgccgaggggtggcctccccacttgggaatgaagtcaccatcccttggaagctgtcccagttggaccctagaaaagagaactcactgatctggctctgagaaattggcttccggaccaattccaatggcattttcccaaagcgaggattttccaataactgcccattcctattatttcctcttttaccaatgtcttcctccccatgggtcagatccggcacagaactcagttgttcctggtgggagatacttgccacagaccctgagggatcttggttgaggaagtcagtgcttgggtctagaggagtttggcaggcagcactcggtgggttgcaaacggtgctgaggctgtgatcaagaacacacttggagggcacacctagcatggagtctggctgggcctgttggggcgtacctgtaggagagttctgggaagactcaggaaaattacaaactccatcacacttgttagaaatgaccttggagagtgcactgacagcttctgtttcaggacaatgttcaggtggctcccctatgccatctaaagtcctacccagctcatcctgggcagaagggtctggagctggtcccttagtctcttctaggactttgatctcaggatcagaggtgttgctcttcatttcccgaggcactgcggtattaagcagtttgtaacttggagaacagcttttgtgactcttgaaaggtttattgctcaagtagtctttctggctgctgggcagaggaggaggaagacccacttctcctacagtttgctgaggccctcctaccccagagtccacaaagcttgtctctgatccctcaggattgctgtgccagggctccaggcctaccctgacctcctgacagtggttattcaggttagggtcactggatgtacgagtcagggggctgcttgtgtcacaggcagaaagaagatcatccatggatctggttttaggtaatctggaaagacaaatataacacctccaggtcaggagatgggcacttgcaatacaatatatggaactgaatcaatggagcaatatcaaagccagagtttagaaataatgacacttaagaacacttaagtttagaaataaggacccttaagatcacaaataaccaatgttcactgaaagtttactctgtaaaaaaagcatgagacatggaccgtgtcctccggaacccaaaaatctatcctcagcttttgtcagcactcaacctaccagtctccctgggcaatctcaaccactacagtggtttcagctgccttctatgccaatgccttctgaatctactgttccagctaggactatacctgagactcaaacccaatatcccactgcctccatcacagtaaaacagaaagaagatgggttttggagctagacaatattggctctgacgctaattagctacatgactacaaataagtaaattaacctctcagatacttggtttctccctttatacaatgatgataataaatcataccttgtagagatgctatgagaattcaaaatacaggcaaccaaccacaaacataataaccacaaactttattaagacaacacaactccctcaacactgctcttgataaccacttagcagcagtgtgctcctctgcttcccaaggccccatgaaacttcccctagtatatagcactcagagttctagaggcattcatatataccagataggttaagggacattttcaagagtgaccatcctgattattaatgcagttcaaagtccttagagcaatgaaaacttgagtgaaattcaccagggaaacagtagaggcttcactggcctcctatttttagatggctcagtcagttcagcctatgcggaaaaattccccaaaggcagttacaacgcagcttattttaagtaatcggtttttgaaacttaaaacaaatgttttatacatacttgatataccttttgtgacgaattttgatttttttaatggtacgaaattccaggaaggcaataacagtggttatcattatagttcctggagtcccataggcagggttcaaatcccaatttaacaacatctttgctgtgtgactttaacttctctacgcctcagatccctcatctatggaataaaggtaaagtacctagctcttaaagctattatgaagattaaacaaaagaatccacatcaaagcacattgctcagtgcttcctataacacattattgcactttattgtttacttgtttaactccctctactgaagtgtcctgaaggcaggactctgtcttatttgaatccccagcgcctagcacagtaccaggggcaaatgacttgagaaatgaatgaatgagctcaaaatacaacatgaggtttccactgctaggtgccaattgaatgtgtgatacacatcaggcatcttagtggatcttcttagacatccagacaaccagggtccacccaagacctactgaataagaatggccaagagtggggcctagggatctgtattcttttaagtgccacagctgacttctttcattttattttttattatggaaactttcaagcatacaaaagaagtaaagaatatgctgggcacagtggctcatgcctataatctcaacactttgggaggtcaaggcaggcagatctctcgaggccacaagtccaagaccagcctggccaacatggtgaaatcccatctctactaaaaatacaaaaactagctgggcatggtggtgcatgcctgtaaacccagctcctacttgggaggctgaggcatgagaatcgcttgaacctgggaggcaagaggcagaggttgcagtgagccgagatcgcaccactatattccagcctgggtgacagagcaagactctgtctcaaacaacaacaaaaagaagaatataattaacttccatgtgctcttcatccaaattcaaataacaacattctgccatcctccacaactcattctatgtgtaccaaaggttagtcagcaatgttgacagagataataatacctgagtttacaacaaggagagagagctcatccagctaggaggtcaaggaaggctacagagagagggtaggatttgagatgggtatagaagaatgtgtttatgactttaatggaagaagaagaagaaggaggaggagaaggagaaggagaagcgggggaggaggggggaggaggggggaggagggggaggagggggagaagaaggagaagaagaaggacatttttgatctagggaaaggtagaatcaaaggtaagtcaggtcagttgttacagagaccatttcctttaaaatctttataccaattatttctcgaaatctactctccatcttgagctgcctacaacacacctccttctttgctgtcaactaatatttcaatcccaatttccctgtatctccgctttctccccaaactggctggtcttctcgacctttcaatgtctattagtggtactaatattctcctactttttaagctcagatacttgggacccaaagtacttttcacttctactctccaactttcaattctgtagcctgccaatggttctctacagtgcttctgaatttaatcctttctctttgccagggactcttcccctcatatctgaactactacagcagtgctggctggtctctgtgcctccagctaccctgtactcactgattagttctccaaggatcccactgtcagcagaccacagtaacttcctacaatgacttcctattgacaactgaatcaaaataaactcttcactgtaatgtttaaagccttcaatgccctcaatgacctgtcctatatttccactattccttaaaatagccccttctcaacccctgccagccacagaacttcttttttttttaaaaaaaaaaaaactacctctcacccaggtgcagtggctcacacctataatcctagcactttgggaggccaaggtgagcggatcacttgaggtcaggagttcgagaccagcttggccaacatggcgaaaccccgtctctactaaaaatacaaaaattagccaggtgtagtggcacacacctgtaatcccagttactcgggaggctgaggcagaagaatcacttgaacccggtgggcggagtgagctgagaagatcatgtgactgcactccagctgggcaatggagcgagaaaaccctacctctcatgtatccacttgctttggacccctctccactaaccttgttactgagctcacaactccctttatttcattcatttgtccagttttttttttttttgagacagtctcactctgttgcccgggctggagtgcagtggcgcgatctctgctcactgcaaactccgccttcccaggttcataccattctcctgcctcagcctc[211 bp omitted]ctttagtaaatttatttaaatttacttattacgtgccaggttctaagccagatacacagaacacaaaaagacccacagttcttgtctggtccttcatgaaaatttcctgagtaaaacagccaccaagtgacccttttaaaaaacacatcatttctctaaagctttgaactacacacatttgtttttttgagacaaggtctcgctgtgtcacccaggctggagtgcaatggcatgatcacagctcactgcagcctcaacctgctgggagcaaacaatcctcctacgtcagccctccaagtagctgggaccacaggcgcacgccaccatgcctggctaatttttgcattttttgtagaggtggggttctaccatgttgcccaggttggtctcaaactcctgggctcaagcaatctgcgcaccttggcctcccaaagtgctgggattacaggcatgagccactgcacccagcctgaactacacacattc[208 bp omitted]gagacagaagaatcacttgaacccgggaggcggaggttg[132 bp omitted]cttgaaagtagaaccaatatcttctatttctttgctgtagcccacaaaacctagtacagtaatacgcaacttgtaggtattaaagaaacatttgttgaattgataaatcagatactaagttaatgaaatgattattaaatgggtcacagagcttattaaaaatttgattaaaagttatggcccctctcccaggaaaagtaaacctatgaacctgtagccaaattctgcatagtttggggaaggaaaaaaaaaatcactgaaatcctgaaacctatcacggtcccctcacaatgacttagttcaaaagaccctaaaaccaataatttgggatgctgggctttttgttttcctttataatattcaaccaataacatatgttatattttaactttaaaaactttcagccaggctgggcatggtggctcacacctgtaattccagtgttttgggaggccaaggcaggaagatcactcgacgccaggaatttaagactaacctgggcaacagacccgtctctacaaaaaataaaaattggcacatgcctaatgagctaattagctacctgggaggctgaaacagaaggattacctgaggtcaggagtttgaggttactataattgtgccactgcacccagcctgagtgacagaacaagaccctgtctctaaaaaacaaaaaagctctcagccaataaacaaatatcaaaatttgagatatatatacacatatatacacgtatatatgtatatatgtgtgtatatatatagtatacatatatacacacatatatgtatatgtctatgtatatacgtatacatgtatatatgtatacggatatatatacatatatgtgtatatatatatacgcgtatatatgtatatatatcctttgagcacagtattttcattcaaaaatactagcacaaatgcaaaaatatgcatacaaagtaaccctactggccaggcgcaggagctcacacctgtaatcccaacactttgggaggccgagatggtggataacttgaggtcaggagttcaagaccagtgtgaccaacatggtaaaaccccgtctctactacaaatacaaaaattagctgggcatggtggcgcatgcctgtaatcccagctactcgagaggctggggcaggagaatcacctgaacccgggaggcagaggttgcagtgagctgagattgtgccactgcagtccagcctgggcaacagagcgaaactctgtcaaaaacaaaaaaacaaaacaaaaaaaaaacacacaaagtaaccctactaaactatgtacttaaaaatggtgtagatggtaaatagcatgtgtattttacaattttttttttttttttttgagatggagtctcactctattgcccaggctggagtgcgtggcgtgatcttggcttactgcaatctccacccccccagattcaagcgattcttatgcctcagcctcctgagtagatgggattacaggtgcctgccaccatgcccggctaatttttgtatttttagtagagacagggtttc[133 bp omitted]atataaggatgtaaagcactccctgtaatgataaaaaaaaaaaaaatggaaattacctaaatgatgagtaggaatctggttatataaattgtggactactctgaagccaataaaaacaagaaagggaatttagatgtgctgtcatgagaagacaacctaatacaaagcgggaaaaacaatttgcagaatatgcaaaaaagtaaaaagcgtatgtaaaaatattctgattttgtttataaaaaatgtttccatatgaaagcgtgagtgtggatttacctatgtagagataaacatttggaaagacacgtaccaaatgttagcagtggacacctgtggggacaaggatcataagggaagattttcattttctacttttatattgactatttttttaaaacaagaaataggtattactctcataaattaaccaacatcatctcacttctccccaaacattgagccagaagatacctaattttatgtctcccttttaaattctggcctttttctgagggagtaatataaggccatcctcctgctgggaacccatttccctgagagtcagatgtttctggaagctaatgctggacacaacaaaggttgctactaatatagcaagctccccatgccctgtaccagtgaacaaaaatcaagaccattcccacaaaccttcctaaaacagtcctttctgttttgttctctcccctgcttgggtatatcatacagagtgatagcagctcctccaggaaagaaagtatccaaccttatcttcagaggaccttgaaaacacacagagtgcactccaggctagctacaagtcttggccaagtttttcctgcaaatgactcaagaagttgcttttaaatacctcagaaagaggccgggcacggtggctcacgcctgtaatcccatcactttgggaggccgaggcaggtggatcatttgaggtcaggagtttgagaccagcctggccaacatggtgaaaccccatctctactaaaaatacaaaaaattggctgggcgtggtggtcggtgcctgtaatccaagctactcgggaggctggggcaggagaatcagttgaacccgggaagtggaggttgcagtgagccaagattgcaccactggcactccaccctgggcgacaaagtgagattccgtctcaaaaaaaagaaagaaagagaacatttagatgagatgggaaacagttactgccttcctagtggagagaggagaaaggaagaagggcttttcttacctgtccagagagcggccagagaactcctggctctgggccactggggaaaggtaaagatccatgttttcttccccaagtgtgcatggagatgatgctggcagataaacagctgtccagaggtgcagggcccggacatgacaaacaggatgcaggacctagggaagcagcccaatactagtgctttgtcaagagttccttgtcctttttctttccctaagcccttgactctacattttccctactgactcagctgcttctccctataggtttctaaatagcacctacaggaaaagggctcagactcaccatgtctgagctgggtgtgtagaggaagttatgaaagtttttattgccagctcgaaggagcgcccacacagagcaggtccgcttgtagatgttgcgcttctctcgctcacaggggttgttggccaggaaggtgccgtagaggcaggagtatgtgtgttgcaccagttttacctagaaagcagagagagcttgcacctgggggcctcgggctgtcattccccccatccctgttgtcacaggccttaggacttaccaggaatgcttcattaaattcaaacaggcaggggaactgcttaagcaactgatgaacagaatcaagccactggaggaacacagggcattgttcgttttggtcctccacattctcttggtggccacagcgatctccaaacttgtgcccaaaatccagccagtcagactccactaacacttggaagccctgcaaaaaaagaaactgttcaaacatagggcctctctggaaatgctgatgtgctactcccctgggaactgcccaaagcaggaagctggcagcttcaaagaaaaataggactggacctagaagaggactcaaagccaccaattttccaagcctttgggagttggaaaaaaaaagaaaaaaagagccaccaatgtcctctactgaaagatccccaggacagatccagagggctcaacaccttccctcctgccacattccttctggttttcccaccgaattcctctcaatacctccaacgtcctgtaatatgggtccagtaatattttggccagggctacgatctgcggtgtgcggtcccagccatctgagcagtgtaccagcacaggccggccttcccggtctactgtattagccaccagcacagctgcttttagcatcaccgacaagtgctgcagccatttggtactctccagtgccgacaaccagctacacaaaagcagacatcaagtcggtcacaaagggtgctgaggccacagcagtctctccaccatccacagccagccccacccaacaaagtccccattgagaactgaaaccaagaggtacaacccagggccttttggacaagaggtatctagcaggaaggtagggaagacaggacctacagcagataaaagcatctgaagctcaaaagaggaactgagaagcatcacatgcacactcagccatttcctctccccagttctctgtgttctttgagtagaacaactgatccaaacgaaaggaatccatgtcctgtgaccacgccaaagtgttggctgagaagtggaagggttcttggaactagcccacggcacccaactccacccaggccctcaggtctcctgctctccaaacttctcatctccccatctaatcttccaagaataagaggtactgggtaaggaatgagactggaaggaatccaagtagggaacacctacttgctaggatccggcatctggctacacacagcccggaggtactgaaagctgttccggatggcatggatgttggccattcccatgaacacgacctcacagttgggatagtactctgtagacatgacaggagagtgggacataaaagcacgtcctaggccgggcgcggtggctcacacctgtaatcccagcactttgggaggctgaagcggttggatcacctgaggtcaggagttcaagaacagcctgactaacacagtgaaaccccatctctactaaaaatataaaaattagctggccatagtggtaggcacttgtaatcccagctactcgggagactgaggcaggag[132 bp omitted]tccaggacaagagtggtcctggtggacaaagctttcctggcagggcagagcactccaggataggaactaaatacagtcttgaaatctgaatcacacttgtatctctggagactcaggtgccatatattaataatagtaacagtaatgacaaatgatagcagtacttagaaagacaatatataatcaattctcaataaatagtagctgctctgtggcaataattttatatatacaacttctttttcttttttaagacagggtctcatggtcacccaggctagaggtgcagtggcatgatatcagctcactgcaacctctgcgtcccagatgcaagcgattctcatgcctcagcctcccaagtggctgggatggggccacaggcatgcaccatcatgcccagctaatggtttgtatttttgatagaggcagggtttcaccatgttgcccaggctggtctcaaactcctgagctcaagccatccgcctgcctctgcctcccaaagtactgggattacaggcatgagccactgggcccagcctacatatgcaacttctaatcatcccaacaattttgcaaagtgtgtaacatccccttcttatagaagagaaaataaagcttggacagattaagcaacttcagcatagtcatagccatagctagtaggtagcaaagttgtgattacaagccaggtttgtttgggctctttccactatacaaatggcccccaaccccctcctcaccaaagccacccagagcacaggctggctgcagacactgggataacagcaataccttcacattcacagcctccacccttggcccggttggccactgctgccgtgtaggatcgcgcatccaggatcagcagcttttgaggagctgctgtgctctccactccagagcacgcagtcagagaagaatctaaacacacagcaggaaggagtccctgagtcagccagccacccaacctcttgctggccctctggcactccctctcagaaggcagaacatgcaactagagacccctcataccccacagcttctgacaaggcagggaccccagcaccccgtgtgttgtcatcttcccagactctcactggggactccctgggagccaatgaagccaaggagggggcctgctccctggggggttagcatcatccacaccttaccaaagtcagcatcacacgcctcgctggtatcattattcccggtgctgagggagcccccagtggcccttgtccccgggtccagggcacaggctttagcaatggacgtgaccaggtactcatcatcagcattgcgccagccccaccagctgatctctggctggctgcagcgggcgatggcagccccattgcgcaagtgtctgacaaaacagaagaaaccgtaatgcccttggcattcgaagcctccagaggcctacctcagggggttagaccaaagtctctagagccagcaggggctaccaactcatccaggccataacagcaaccaaaagccccaacgtcactagcaggcttcaccgtttacaaagcaccatcacacatactttctcaaatgggctctgtatgtccaaggtgaccttgactcatcaaatctgcacagcaactgctccaggtacagacacccagcaggagaacaaggcctggctgagccaagaataggaacaattccaaacttcagggttacttcctgtctcactctattttagctacaatattctagtgcagggatcagcaaacattttcagtaaaaaaccagacaacaatttttggccttgtgggtcacaaccagtttctgtcatgtattcttctttgctttttttaaaaatagccctttaaaaatgtaaaaaccactcacagcttacaagccgttttatataataggctataagccagattttgtctgcaggccagtttgccaacccctgtactaatgtgtgtataaaataatgtactattttatacacacacacacacacacacacacacacacacacactctaaaaaaagggggggaatgaataaactccctaatagccttattcttaggagaaaaaactaagatagtttttgttttaaagttatttcatacttccccatagagtgtcaattctcagtcaaccaggttacccaaaatctccaattttgactctttccttgttgcataagaaatggcctccctacttcccagccccactgcctcacctatacacaaccacgggaatccgcttccaggagcggaaggaagccacgttctccagctctttgtcagtgatccacacaggaaccagcagcttctgggggtaactggggcacaatctgagaagagaccaggtgggggtcactgcactgggtctaaaacatgtgatgacaggatccctggggatggctttgtgggaagagaaaccatgagccttcctccctctcagactcagaagctgtgcccaccacactttatccaaacacggaagtagtttggtgtggaaggtgttttggtccccaaccctctcacttgtagttgctgttgatgtgtgagactctccagacgttctgcaggtcaaagcccatccttgcaagctccgcctcctgtcgacaacgtatgtgctcacctgcaacagagcccccacgatggttagcttcccagagcaccaatgtgcaggagtggaggagggatgagaactaaggggtaagaagcagcctcccaaagaaaatagactggcctcacctggctgacataggtgagtgtgctggtcctcctcggtcagccccaggcaccaggcatggtaggcaaaggcaaagaggtcttcaggcttggcaggtcttgctgtggctcggcttagccgtgagagccactcttggcactgcttaaaagtggagaagtggcacctgccaggcaagaagccacaggcctaggtgaggcaaagtgcagttgtgccatggggctatcagggccaaaaacacagccacaggaaggctgtgaggagagaaggctgcaaagcaagaggtaaagcagtggggacccagggtggggggacgagggacactggccaacacccaacagaagttgtctcttgtgataattctcttcccaagaactcctgtgtttgaggcatacttatcctctcgaatggggcgctactgtttctcgtatcaaatctaaatgctaccatgtggccctgaacgtctgcactccttgtccctaccctaatggaccagtgttatctcccatgactccctaactcaaaccttctgcttcaggcgggaagttctgctcacatccttcccatctccttggtttatcttctgcttgataatgtctcctctctgcctagccacatcctactgatgctttgaagatagtttcagtctcacctcttccttgaagccttcccagcctactctattccagaaactccttcctctcttgattcttaatgtgcttggaatatatatatatacctttttttttttttttgagagagggtcttgctcttgctctgtcacccaggctggagtgtagtggcacgatcacagctccctgcagcctcgacctcctgggctcaggcaatcctcacaaatcagtcccctgagtagctgagaccataattgtgcaccaccacgtctggctaactttttaaattcttcatagagacagggtctctctatgttgtccaggctgatcttgaactcctgggctcaagcgatcctcctccctcggcctcccaaagtactaggattacaggtatgtgccactgtgcctggcctacttggagtactaagcaacacattttcccatagcatattgccacatgttaaatcttcttccagcagctagagtttagcctccttgaagggaagggcaatgtgaatgctccttctgaatgccccacagacctgagcacatggtaggctctaaagtaggtatccttttaataaaccttggagtcatccagattcctctttctttcacttcaaatctgtcagcaaatcttctcatctccaccttcaaaatacacccagaatctgaatgcttctcaccgctttggctgctaccacctcagacaggccaccatgatctctcatctgggtaactgcaatagcttcctaactagtctcccagtttttgcttttgctcttgcccccattctctttcatctagtctcaatatagcagccagtgtgattctatgaaacattaatcagatcacatcactcctttgctcaaaatcctccagtggtttctcagttccctcaaagtaaaagccagtcttcatgacagccaaagtgtctgacacccggctttgttctcaggtcatataacccactaccctcacccacacgtgctctactccaacaacaccagcctccctgccagtctcccaatatgcaggcacacacccacctcaaggcctttgcacttgccgttctctgtctctggcacactcttccaccaaatagccacatggccactttcttcaagtcttgactcgactgccaccttttcggtgcagcttctctgatcacttttgtttttttgagacagggtctcactctgtcatccaggctggagtgcagtggtgtaatcacagctcactgcagcctcgacttctcaggctcaagaggtcctcctatctcagcctcttgagtagctgggactacaggcatgcatcaccacgcctggctaattttttatatttttagtagagatggggtctcgtcctgttgcccaagctgatcttgaactcctaagctgaagcgatctccccacgcatcaccacacctggctaattttttctatttttagtagagatggggtctcgctatgttgcccaggctgatcttgaactcctaagctgaagggatcttcccaccttggccacccgaagtgctggtattacaggcgtgaaccaccgtgcccagcctgattgttttacaatcttcaccctcatagcactccttattccctttccctgctttatttttttcctttacacttactatcatttcacaaattttacttattacttacggttggtatctcctcattggaatgtaagctctctgaggcggcaaaattttgtctatttgttccctgctgtatccccagggcttaaaacaggctggcattgagtagggtactcaatacatgtatatcaaatgaataaataaataaaccaacaataatatgagtgctctgtgccagatattgtcctcggtgctttcatacacatacacattatctcacttaatccttacgatgactccatgaactaggcattacccccattttttcaggtcaagatcctatgggtcagtaaactgacctcccaacccagaacatggtcttcaccttttcttccaactggggaaagtgaggcaggatctttcctctcttgcaccagagaaaccctgcagcacagagaactggacaagactagggccaggggacctgagtgaggctccgttgttctcacctcaccactttggagtccttgcaggaaatgtgcaactggaacatatcacggctctccacactgtcaatcatccggagggggacctgtagaggaagggcaaactgaagctcagactccccactgggtaccactcctcaccctcaccctagcgtaggcactaatgtatcaatagcaggaaggaaaccaacatttactgagggtctgttaagcacctggtaactgtacggagtcctctgcatatgtgatcccaattaatgatcccaataacgttgcacagcaggtgctttcagcccatattacgaggagaaaaatcaagcctcagttaggtgacttgaccaaggtcacccagctggtgagtggcaacgcaggaaaagagcccaggtttgcctgactccaaagcctgtgttcttccaacaatgccactgtgctccttagaagggccagtaatagaataatggaaagagagaagaggagaaaggagaatgagccagaaacagagctaggaaaatgaggcaggaaaacatgaggtcagagagaaacagaagggatccccaacttttttttttttatttttttgagaggtagtctcaccctgtcacccaagctggacagcagtggcacaatctcggctcactgcaacctccacctcccaggttcaagtgattcccgtacctcagcccccgagtaggtgggattacaggtgcgcaccaccaagcccgactaatttttgtattgttagtaga[153 bp omitted]acaatcccaccttgaacttcatagggattctagcttaggggtaggagaacaatacagaaactcacgttgatgacagagtccttgaatttgatatgcagccggtagttagagatggcaatgagggcatcggctgcccggcccaggaactctactccctcaccctgcagcactgtgaaggggacctgtcaaggggcagagaaaccttcagtccagaagtgagtgaccaccttatcctcttctacagcccctgatctgtgggatcccctctggaaaaggtgggccaaggcaagagaggagagttctctccacggtaacagcaccaggcaacagctgtacaggaaagctgcctttccttccctgcggccaaaggctccaggatgcgcagacaaaccctcctcctccagagaccagggaacatgaagccagagctctggtaccagatgcccttgaggatttttgggagaagggagggtgttttttaactgggcagggagccccatctatcctggcccccaactcctccttacctgaagattctcttcctccttcactagttccttgggggggaacagatccttggcttggatgtactccaggctggggggcccctcctcaccctgtaggaaggccacagtcctaagtcaccaagctccacttagcccatcaggctcattctgctcctctccccaccaagaaatccacagatacccacacacacacacctctaaaggttctggtcaccagagaagggaaaagagatctgacttggttggagacagggaagggtgaaatggagagcatatcagcctattaagcctaaggaaagagtgaggccccaggaggaattgggaatctgcactcttcaaagagggactctcctatagaaccaacatttcaaaaatggaggagagaaaactaaggaaaagaaagactctttcccttagacccgcataagggtaaggcaggagtggggatgggaaagtgctgtcctgaggaaaaggagccaggtatggcagctggtttcagagagaagggaaatcaggcgcctacaagccactgaagcttcaatctggtgggtgaaggagacaaagaggagtgggtggggggattcagtcccacgcctctagagggccttcaccgacgctttcaaaaggaagacgtgtttgagagctgggcttatcttcttgttagacccacattgctgacaagcccccattacctgccaagtaacctgctctgcctgctaatcagaggggaattcctgaggaatacccacagcaagcaaaaggaactcccctcccaaccaccagggaggggacccggggggatccacgcgcctgggaggagccaggagacccaaggacagccaggggagagagagagaggaggcccggcagacacccacggggaaggtggggggacagctgagaggacagatgggggaagctgggaaggagcatcagccagagcgggaggaggggaggaccgggaatgatgcagaggtacggaaccctgcagaggcagggaagatggagaagagaggctgtctgggggacagtcaaggagaaaaggctggcatgccaggtgagggatggaatggtggaagagggaagggactggagccccaagccagctcaaagacatcccgtgctccccgaccaacctcctaacatcccattcagcctactagccacatcccacatccccaagcaaggattcagcgggtgggaccaagagggagaggcggaggtaaagggatgtacccctgcagggcggggcctagagatctgcagtcaagggcagtggctgcggggccaggatggaccacagaatttccattcctggccttcgaccatctccggcacccaaagattgaagcaagtccaagaaataaaagggttaacccaccttccctgccccccaaacgttcggggccgggccaggggcctcgggaagggggatgggctgaaatcgagggctgaccctgggcggggctgcgggtgcctcctaggcccccaaaggcagggtgggcacttacgaagcagctaagcatggagcaggagacgcgggcggtcaggctcatggtcgcgggcggtctgggccagcgcacatgtccccggagccgctgcgctgcccgccagccccgggcgcccgccgcatcccggctgcggggctcgccaggtgcagccgcggcggccaagaggctagggcgctggtggccgggcctccgcgcggctcccgcgcgcctctcccctcctctccacaatggagcgggcccagctccgccctcccgcacgagtgcagaagggaggggagccaggcgaggggagagcccgggaccgcggcgggaaggcggaggtagaggcggggcggctccgcgggccccgcccacaagcccagcctcctccctccccgcggaccctgggcctcgtaggagggcgtaccctactccagggacctttaggagctttcaggaatctgggctacgggaccgcccacatcttctcatttcccttcttctaaggtgagccaccccatgccctcttacaaacccatccccgcgccccctcccctaagttcccccgacgcctgctctggatcccaaggtggagctcacctacccgcaccccatttgcttcctcctttccctccaaaaccactacccaccatgcccctgcccatcagggtccttcaatcccgtgacttcgttaaacctttctttccccttagaatggtgccaggttagtcattccacgctcctggaaagggaaatgagctttttattccaacgcccctacccaaccctactccttcagctccatctctcccttgtttcacattctgatctctgggtaagaaagcccttcttggaggagaaaggatttcttagtctgggaaagtgaagagctagaagtatcgaccacagaagctatacaaaaaaacgaaacttgaaacccaggagcagcggagtagagagagttgggtagagggccaaggaataaggaccaggaataaggggctcaaaatgtcaccaagagtcacagagggaggtggctggaaccccaaacttcctgcaccttgtaactttcagacaccagggcttttgtcttgtttgggggagaagggagtaataaaagaaaacctgacattttattaagcatctacaatgagccaggcagtttctaacattatctcagtaaaacttttcaagccccaagaagtaaaccttatcctgtcttactcgtgagactcaagcttagagagaaagtatgtaatttaactaagtggtggtgctaggatttgaaattagatgaagctgactgtgaagcccatgctcttttcagggtagcccagaagagaaaaagaggagctatctgttggtgggggccaaaaccagcaggctttctgagaagagactgaaccaatagtgcacacaccaaatccacatgtctatggaaggaagggagggaaggaggaaatcctctcatctactgaattctttaacctgcccctaagcacaagggacacctaaaagacaccgaagagatactaccaggttaagggcctggtctgggccagggcctacagctctctaggcctttcccatctcactgcctcctcctagctcttaggagttaagggcttccctggacttggggtgagagaagggctgttacagttaatggaaaattaataggatcattgtaaaccacctctggtgatattctgggcaccctgaagatgctatcctgatagatattcaatcagctgtcacctgtagtggcttaacagcagcaccctggaactagagaagccccacagttttggtggagtcactcctgatatagcatccacaatattcaaaggacccaccagaagtccaaagatcttgagataaagaaggcccagcttttcagaccagaacacagagattctaccggggacccaagaaaagcaagaagagggctgttatgaagggttaatagaaccagtggtgggtagggagtaggaggaaagtgtggggcctagcacatgcagaaaatgatttctagaagcttccagtcccagtgctgtatactggctgatgttttgcaatctaaagaaaccctaatttatctccagggcagatgaacatgtttaggagctgaacagggtagcctggagctcaaggtctaggacaggtggggcagcttcacagagaaagacacatggattacagaaaacacaatggcctgaggaaagacagggtactcaccattctaccgtggcaagggtactggctgcctgcttctcactgtaaggagacagaggaacataaaagtaaaggaccccattaacattaccatagaatcaacaaatgacacacatctacccctgaccttctctacaactcttattcttctccctcacagagactccagtctctccacaagtcaccatgccagagagaggcaatgggagctacatgaggagaaagcaacaagtgatcctgcagggcatgaagtcagccacgaagttctgaaacaggaatgagtgtcatccaagattattcagcagaattcaggagtcctgatttccagacgcagagggagaacacttctttctcagggagcagaactgccaactatgaagagacacaggctgcccaactggggctcattttaggccctgactcttggggtgaagtggcagtagttgaaggagcatgaatccacaggaatgttttgccagtctctgagtctgggagtagtacccacctgacctgtttactgggggcagagtccagagtgggacaagagggaggggaccacaacctgtgatcagagggcagcagggctgcacaggtcctcctgagtgtatttgacaccaagtggggtggaggttatggagaggaggccacacaacagggacagaatcaggccaatccaggccttggagtcagcatctgtccaatgagcccaagtaacagggatttcaggatagggcctcctaggctcacttagggagccaggcctaggtttcactgacactttccttcatgcctgctttcctcaggcagtgcagcagagccctgcgggaggctgcggggataaaagcctccatctgtggtactgcccacctccctgttcacagtatcctcttccctaggccattctccctcatgggggaaccggcaagaggcaagccagaggtgctgcctcaccgcccactggcagcagccccagggaaggaagggagggaaggagggacaaggatcaggcctgggaggcccagggttttcagacctaggggatctggtcccagggggcgggccaggttggcaggggagcccaggtgcccaggttctaggggcggagcctaaagactgggaggcggagccccaaatgacagaaggcgggactcaggaaagccggtgggggccagggcggagccgggcaagacgcggtcgttgcggttcccaggcttgcagtgcagggggcacggtgactcacccaggcggcgtccgcccgaccctctgaggccgcgctcttgccacttccgtctcccgcagctgctgaggccgcgcagtcccgaccccaccacagtgcccctctcctgaaccaatcatatctctagcctgtacccgccctggccaatggccacgccaagtcccgccctgcccccatcacgcagccaccgccctcactctcgaccccactcattggtcgagtcgggcaaacgccctcccagcctttagccaatcggatgcctaaagacgagactatacctggaggaaggaggcgcggcgccggaggggagacgcgaccaatgggaaatcacagcgcgtccttgcggcagccaataggagagcagtaaagagggggctgctggccactgctctggggaccggaagtggaggcggctcgtcgcctactggtagcgcaattagaggcgggcattgtaggttacatgcctaaagccacttccggtgatggccccgcccaggaggtacttctgaaacaggtccccagtggcacctcagtttatccattcccgttttggtttcgcagctgtcatccggtcccaacgccagaataggagaaaaacctgcaggctaagagagaagggagggctgggcctgaggttcagtcttggtcatctccgactggcggcgctaggatttcccccttcctgtgtcttgatgggttcctccaacactcactttgtatcgataaacgaccctgcagttcttcacgacctgcattgcgctggcagtcctgagtgaagaactctcctctcatcccagagatgggaaacctggatctgagactgccagctagctgcggcctcctagtctgtaaagcgaagggagaccaggacgctcccaaggacccggcttatcgcccctccctttccttcccggggacccagaacagaccacaagacggagggtggccgctggaggtcgccgtggccccgcgataccaccaaccgacagaaatggagaacagttgattcagattcagctgatattctcaggtctggagcgggcctgagcgctttaattagcccggggctaatgtcctcacccatctttgtttatagaacgttgaaactccagtactgttggtaagttccaggaagacaggaactttgcactacttgaactccagggtctagaacagcctgcaatctagcagatgctgtaaattttttaattaaatactgaactcctgtaggacggtgattgtgtttttattcattcccagcacttactatagtgtttggtgattacaatggctgcagcatttgttcaaagctctatcacaggctttctacagtgtagagcttaacctgcctatcccttttcccagatcaggggaaacagaaagtcaggaggttgcacgcagttaataccttgtgttttcccaagggcaggtatcaaatacaaaactgcgtccgccgcagctggaatacgcacaggcatcaaaatggggccttttgggccgggcgcggtggctcatgcctgtaatcccagcaccttggggggcc[258 bp omitted]ttggggaagtgccccaaatttctttttctttttatttttcttttttttttttgagacggagtctcgccctgtcacccaggctggagtgcagtggcgccatctcagctcacttcaagctccgcctcccgggttcagccattctcctgcctcagcctcccgagtagctgggactacaggcgcccgccaccacgcccggctattttgtatttttagtagagacagggtttcactttctccttagccaggagaagtgccccaaatttctaatcccttaagccaggaccttggtagccctgaggtgtgatgggagactctggacagaaccacctgttgacctatccaggacccaaatatgcaccacaggtaggaatctttttattaccaaaggtactgtatgtgtgaaagatggagagagacccagaccccagataacagaggcatgatagatatgatcgtcaagatggagaagccaggctggattctaagcagggacttagaaggggaaaggaagtggaaagttttccccactctcccttccctactaaaagccagaaaccaacatcttctaccattagcctttcaaaactgggtcccaggatcttgatctccaggtcataaaaatacacacagggacaccagaagccacctacagatttattaaactttatttcctctgagtctctgggcagtcagcagggatgtaaggcgaagtggcagtagctgaaggggcctgagcagagctggtgctgggaggggccggcatggacaggaagaagaggaggagatttaaatatccagggctgaaagccagttaatagttctccttcatctgtttttgtattttgtgtagcatctcctgcatccgccgcagctggaataggcacaggcatcaaaatggggacttttggagagtcctttagtattgggaaagtgccccaaatttctaatcccttaagccagaaccttggtagccgtgaggtgtgatggagactctggacagaaccacctattgacctatccaggacccaaatatgcaccagagccagggatctttctattaccaaacaaagagataccaacgttggtgatcaaacaggagacctcccctataccccatactgctctcacctcctcatctttctctcggataagcttctcagtttctggatctgtccctggtgggacagcagggatggggaagtcggtaccactttcccgagtcagtttgctaaagggagaaaagggttgataaggcgaggaggaccccagcacccgcttagattgagcccagggcctatagaagaacaaaagtagggcttggtctcacccaaggctaggcttgggatctccccctgccagctttgtcctggcttctggtcatacttgcgattccgttccttcaccaccaggcgggtcatgctctggatgcactgtgcccggtagttctcataatgtgtctcccgtgtcacatccttcaggtcctgcatgtgggtacgtaccagcattgtcctcagcttcacaaagtcgcagtgccctgggttttccactgcatagcaaggctaggggtcagccagaggcataggtaggggagagccactgagggcaaggagataccctggtcacaggctcagtgctttaccttccacgatgccccaggggtagagtcgaccccgaactcgccgccctctggcctctactacagtgttgctgccaattactgcaaatgggatgctttcctggaagaggttaggggtgcctgtcagcaccctctgttctcacctctttctttccacctgtatcgtcatcttctctgcttcattctaggaagccagggtcctttcccaccctgatagcctgaatatagaattctactccctttttctacccggaagaaataagataggaatgggatgccctagagtggccccacctttagggcttggtcctgcaatttgaagtcctcatcctcatcagagtcacagtctgggaattgatagatcttgattccaaaatgctcaatctcctcccggatctgacaaacagatgaggggcccacagttctggggaccacatcctttctagaagcccacctgatcccctcccaccaccagcttccctcactttgcgtttcttgtggtccacttcgggaggtgtcagtgtgtctgccttagccaggataggcacgatgttgacccgctgatgcagggccttcatgaattcaacatccaatggccggagcctggggaacaggaacctgtgaccacctgctagtggcagccctgcccctggtgctcttggcctgttcccttgacagcacccggtggtgccaggagcctcaggcttggaccatacccatggccgaagggtgagatgaagtacaggcagcagtgcaccctgttgtcttggatgttctttcggttcaggccactctcgtctcggaaatactgctcaaactgctgatcaatgtattctgccacaggcttccagctggggcagggacagacaagcagagaaactgtgagagtgggagccacctagtgagctctgggactacagagaagtagcccactccctgagcagtgtttttaagacactgttattccctggcttgctttactaaatctttagagaaattcctgaatggggtggggtgtatctcacatgtcctgatacaaaattagactgagtactcaggcaagtttaataaatactagcttgatgagagggaaagggcccaggtgatcaaacaaagcagtaagaataggctgggcacggtggcttacccctgtaatcccaacactttgggaggccgaggcgggtggatcacttaaggtcaggagtttgagaccaccctgaccaacatggtgaaaccctgtctccactaaaaatacaaaaattagctgggcgtggtggtgtgcacctgagtagtcccagctactcaggagtccgaggcaggagaatcacttgaacccaggaggcagaggttgcagtgagccaagatcataccactccagcctgggtgatggagccagactgtcacaaaaaaaaaaaaaaaaagaagaagaagaagaaaaaaagaatagcaaggtggctgcaggcaaataccaactggaagccagggaaaccctaagtcaggtttccagtgtaacctcagagcctctttgctcatgtgtttctaccctttcctctacctctccaaacccactccatccttcaaggccctaagaaccatctcttccacgaagtctcctttgactataccaatacacactgctctccccttctcttcactacaaagcaaaacaaataaataaataaatttccccaagaacctcaattttcatatcctttgctcttctattatcttgtttaatcctcactgccctgacaggtggacattatgcattatgatcatcatcactctcatttcatacatgaagaaactaaatccagagcagctaacagatttgctccaggccaggtgtggtagttcacgcctgtaatcctagcactttaggaggccaaggtaggctgatcacttgagcccaggagttcaagaccagactgggcaacatagcgagacccccatctctacaaaaaatacaaaaaagttagcttggtgtggtggcatacacctgtagtaccagctacttgggaggttgaggtgggaagataacctgagcccggggagccccgggaggtggttgatcaggccactgcactctagcctgggcaacagagtgagaaccagtctcaaaaaaaaaaaaaaaagaaaggaggaaggagagggaaaggaaaaggactttctgtaggtcatttagctagtaaattctctacccacctgaacccctacagctcagtgcacttgccactacacattgcctgacccatttactaatttaagttgctatctgattgaaacatgttagagaactgcccccacctcccctgcttccctgttgccacttgactataagcctctcagggataggaatcattcatgcttgttctgaatcccttaaaatgtccaccacaggctggacatctagtatgtgctcacattctagctgatttgatgctctgccgttgccatgttgaaattcttaaaaattttgaacacggggccctacattttcatttgcactgggcccaacaaattatgttgctggtcctgcaattaccattgttaaaattcctgagtatgctgtaaatagccctttacacttttcagtgcgcatgcatcatgttgggtgatgttcaaatcaattggagaggtggtaagggctggtatattttaattaaataagtgtctgacaaaatgaatatatatggaggtacactttaaactgtgaggtgcctggcaaatgaaattattagtattatggaaggtaagagacagtaggtaaattgattgaaggagatcatttgctcaagatcatgaagttactaaatgccaatcaagatttgaactctctgtctagggctcttagcactgcctgcctaacttcttcatcaaagctaccaccttttctcctgtcaatctcatccatttccctcttcatctactcacttaggtctgaccattacctaagctggaggtaacggtcagacctactgaccattagctggaggggggtccctccagtgcctgaaaaataaaaaagcccgaatgatagggggttgtggtaaatccagcttttctttcggcaggtagcctagagggtgcctggagtttaaacaaagttccaccatttttcccttttgcctattcttcctcacctttaccctccctccatacatgcccagcccttcaacaagattgtgtgcggcacctaaaatgttgctagtgaaaggaaaaagggtgacagtttattcggcatctactatgtaatcaactctgtgctacatgttttcacacttcacatgtgtttgtttttaaggctcttctttcttatctttttttttttttttttggaaggtttcgctttgtcttctaggctatagtgcagtagtgcaatcatggctcactgcagcctcaacctcctgagctcaagtgattctcctgcctcaccctccccagtagctgagactacaggcctatgccaccatgcccagctaatttttaaaactttttgtagagatgggatcttactatgttgcccaggctggccttgaactcctggcctcaagtgatacttccgcctcagcctcttctttcttatgtccctaccccattatagaatcatagggcagaattggaaggaacattaaaaatcatctattccaatcctttccctcttactttataaaggaggagatggctgtccagtaagggaagtcacatgctcaaggtcatagaccgcttcctcctgataagtatggatatatctgggcctacgtgtgtacctgtgtatggagaagggtggctcaggggcagctgggattgtgcttactcagacataccactctgtgttgttgactgcatccccaaaacctggtgtgtccacaatggtgagccgcagcctcacacccttctcttctatgtccactgcatgcttagtgatctccacagtttgcatgatcctctctggagaaaggggaaactgaggccagggcaagggcagggacctgcccagtcaggatgaaccgcccaccccaaccagccttgttgctcagactgcctaatccacactgcccccttctccactcccaagctgtctgggggactgttctctgggaaccagcaaggagtacatttcccaacacaggaaatgccggtggctgttggctctggccccagcctcttctctgctcccggtttttttcttggattcctggaatccttgggggtcagagactcattcagagagcaagactctggtctctgccctgcttcagcacccaaatctttagggagctggctggtgggctgccaggcagttaggcctatggagagctgctgtcagtctctctaggaggccatggtttcctgcatgtgggggagagccccatcccccagactctggagtgagtttaatttcccaaggcaagtctgcctgattgtcctctcctttccttaccttcagcaccaagaagtttccggtcccggtacagatcagtgaggaagaggctattgacaagtgtggatttgcccaggccagactctcctgagaggagagaggacagaggcaccaaatcagaaggtaagatctatagccaaaaagcaactccactggatcaaggtttaggggggactgctttcttatctaattggaactagactaaccaaactatagcattttagagctgggaggaagcacagagattggcttgggggagcaagagattgcccagggtcacacaaaaagaggcaaatgctaggaaactgttggtcagatgctctttgcaaccaattcgaacccccacccccaccccaccccacatacatacactctcacaggccaatgactcctggctgttttgcaaaacagtacagccactcgctgcttgctccctgcgacctatactcccttcccactcacggacacacacaccatccccacctgaaacacaccctgcccaacccagccctgccccttttttacctgccaccatgagggtaaagtcaaagcctttcttcacggactttcggtggacttggttggggagggttgcaaagcccacatactccttgtcatcctagtagacaggaaggcagaatgcatcacggtgaggagccaaaggggccccggcacccagcgccaatcttctctccctttcaggcctttgccccagccttaaaaaagcagtgccagacttctgtgagttcccatctgaggccaccagctgggcctcctgcccttgctgaaactgcaaatttccagtgcccttgggggcagatatcttggagctagggctgacacaggactgaaataggtcccagatacacacacacacaaacacacacacacacacacacacacacacacacacacacactctgctccctgcccccggtcttcctgcagcagcccactgaaaggcaaaggcagggctggaggctctacctcagaggaatcatagggatcaagcttgccccatgggctgcggggcctggcagatgggctgagaggggctggggcacagaagtactgctggttgtcagaggactggggccgcgaggggggtctgaactccaggtcatcatcatagaggtccggggcctggggccttggctccgggacttggggcctggatgcccaggtcttagcctctggtgggtggcagctcgcatttcctgagaaatccttcacgaacttgctcagttctccatcatccgtggtgtcctccaggaaacgcttgatctgggggaagcggggtgggtagaatagatgggtggtgccgggaagggagccggaagggaagaatgaggaaggagacagaagacaggagaaggcaagagggaaagggaaagcacttgtggttagaagaaaaagaaactgcagccaagacagaggaagtgctcaccatccctccctcacctgctcacaagcctccccaatccaatatgccaggaagggtcccagggtccaggaagagccctgggcacccccagagccctggcaactgctcttgggaactaaggaactccagttctggtctccttctcagcagcatgttttttgaggctgcctttcctggggttctggcctagccagggactgtctcaggccaggaagtaaggccagactgattaagatagagcagacagaggcattaaacccaaaaggagagtacagtgcatcagaatggggcagggacatgagggaagtaggcaggggagaagaaagctgactgcatcaggcaggtcaaccagcagggggttctgtacctcctgtcactactggtgagctgggggactggggtacagattctactgctggtgctcaattcccagggttcactgcccagcgctcagtatagttgatcctaccccttactccagacactgagccacacccaaatctgaccctgggccctgggagagaagagtaaacccgccagtggatgctgactgtgggtgggaggcagctgggagagaccaggtgagggaggatggaagagcctgggaaaggctgggcctccagagcttctgacagcccccaactgtgagggacatataaggggaagcaccctgagttgtctccttaccccctctgcccagagccggcagtgcacgagagggcctggcctgaaccatgacccacagggagtggaaggcagagaatggactgactcctctgtagaagcctgttctaccccatcctcagctcagaagaggaactgtttcccccaactctcattgtcagctctagaccctaaagattctcctctcctttgggggtcagcctccttcgtggggtgcctggcagtgctgggctcagctctgcctcacaatacccacgtgccacccccagacaatggacaagggccggctgcagaggctgactcactctctgagggttagccaagccagtggggactaccccagaccactgtggagtcccagctagagtgaggaagataagatagccacagtcttcctgcaaagggaagaattgagggaggcagatatgcatactgccaggtgtatgccagagggaagaggttgagatagggaggttagagggaaaagtctgctaggagctactgccaggctgttgcctctgaagtcttcacacctgcttatagccatagtctccagtgctcgcctggacagaggggaggaaaagaggccccttagcccaaaactagaaccagcagatggaggctgggtgaccagaagaggctatcctgaggcaagcctaacccaaggcttttctcacctatgacatttgtgaggtccagtggtgaccatacatcccagtctatgcctgctgtcctggcatcatgattaattgtgccctttcactctcaaaagtgtcccagcttagacaattaattacatggcaacagagaaggggtgggactgggggcagcacgacgtgttgtctggcagctaataagtctggggaattccaggaaatcctgcctctctgcacaaatccacaatgacccagccgttggtctgggggtcaggacaagggtgggagagagaaagctgtgcttcacctggtttcccaggagcactgagtggaggggcagggaagggagaaaggaaggccctaatgaagatccctagcccccatgatcttccagcagagcctccgggaacccagcaccatcctcatctctgccagccctggctgctcatccgcatggagggggccacaggggctctagacaaggagtcaggacaccagggtcctcacctcctgcctgtccatccccactcccagctctgccagtgaccaaatcattttctgactttgagccccaatcccagccaaggcagggggaagacaggtcacgtccacccatctcccagagcagcaccttaccccagcttcagtcctgtcctcagggacagaattcccttgccatcccagtgaacggtccatgtcccacgcttcagactccctgtcagaaagctctaggtctaattttatctcccaggcaaagttcctcacacacagaaacagccttgttttgatgctgttgttgtctggcttcctggcttgctcctttccctttctctttgacccccttctgtctctggcaggggccaaaaaagcctgtggaatgtccttccccacccctcttctcctccccttcccttggctcccaccctccaaggacagctcagctgcagcaggatcacttggttcctctgcagtcccctcctcctctgattggctgtcccatgacgcctgcctgctgcctaccctggtgggcacagcaccaacctcccaatgtctgtttgcagccaggcttttgatccatttgacctctcctgttaacccccaaggacactgtggcctgtatgaggactatgagctatccccaagtgacctggcccatcagcacatgaggacagccacctaggatacccattcccaaaggatttcaatcccccagtctctctttcaccttaactttaagcagtgctggagtaggtgagatgtcctatactcccccatataggtttttgtgggaatggtcccacacttcttcccaagtgttcatttgtttttttttttttttcctgtgaggaacgtcactgtttcagaaatctgctcctaaatttccctgcagggagcatcagccacagagaagactttgctccagggactccccttaccctaggacacctgacctctgacttatagcaacctgtatcaattagatcactccatggcttccatagtgtcaacaggggagctgttagcacttggtctctgaggagcacgggttcaaggcaatgggaggctggcagcccagaagcttcagagctgccatttaggtgggagataaattaaggggcctggttggaagtgtgcactcaactaggggtcaggggtccactgtttctggttgggtggaaacatcttttgtgagtctggatagtgtcttaatttgaggaccttaatgttcagttgtgaatggcccttccttgcctcccagcgaggctggggagagaaagcactcccagatgatagataccttaagctgctttgaacctgagaagagaaggtgcatcccaagtcacaggatggtcattaatgttggcctgtcattcttttcacatgtaaatttaaaccccctggcatagctgggttgggggggtctcccccactgattcccaaagcagctaggacactgacctcctttgacaaagagaccctcatagaggagtctgatctgaaccagtcagcctaagaacttggctggcttgagggcaggggcctgaggatggggactttggtgatggtggttggggtggaggggggtgtgtctttaattagagaagaacagtgtggcctcggacaagccgaaagcaccaagacctcagctgaactgaagttagtgtgtggcagaaaaagcccctctagcccctgctgggcttggcactggggacaatcagtgcttccctaggcttccatccctagaacaatcagtccatccatccaccatgtggggagaagtgggggaaaggaataaggacaggcctctctcaggaacccccgttgggggaaggtcacagggtcaccaagacttcctggccaaggcttgggcctctgcctggacacagcttgagagacaagagcccaaaaggttggccctaccaaacctgaaagcttctgatcccagggggcccagggagctcccttctggaggctgcccacagccaacatcccgccccacaggctggtcagtgatccccccctgctgtaaacagtttgtgtcccccaatgcagagggcaaaggctgtggggcttccagactgagaggagaggacggtgtgtggcctagaggtcctgacacccttacgttatttgtggcaggctctggcaacaatgtcaggagaagagattacatcttcagagccaagcatcaaaaacttcctacctgggcacctccagggaggctggctggggttactgtttctcttcccactacaggcaggtggcagggatgggtgcccccacccccacacactgcagagggacctggctggtggggagggagcgggtagatgcagcaggaggaagctttcccatggttcctgtcccaggggcagaaggatatagctaatcccaccgggcaggatggtgggctgggcctccccctctctggggtccctttgggaaagggccagggactgccccttgtcaggctgagggaaggaggggccaagcgtcttaccatccctcctggtgaggcaggcagtgtttgtgggcctcctctgcgttttccaaatgaagttggtactggcccctgtgcccagggtaggtgggtgaggaggggttactcaggtaaaagctgacccaggcgaggatggggaccctcacctccgcttattactgatgcgccttccccagcccaacaagcgcgtctccaccagcgggcacctccctcagcacggacccaccccttcgtcctagagcgcaggcatcacccaggggttggcgcccactccgtggctgctcagagggaaaaacttgggagcagcgacgcaccgccgcccggcagcagtgccagcctgtgcccggggccggcgacggcgcctcccaccctgcacagccgcggctgcggtgccgcgggtccccttgcagccgcccgggagcgaccggccctgcgcaccccagccctgccccgcgcccgcccgcctgcctgcctgccttaccatggctgcagcccgggcggggccggctccgcctggacagcgcccgagcgacccgcggcggagctgcgcgccgacctcgcagcaccgccgtcaccctcccgcctccccgagtgcggaccgctgcgggaggggcccggcggcgggggcggagcgagtcggccccggggcggggcctgtacctcagctgctagcggtgccggcgcgaagtgggtcggggtgcccagctgggggccggcctcgcagcccgcgacccccggatgcgcagagtatgcagagtcacccaggacagagcggggagcctcagctcctcgtccccgggctgcactggacacctggctcttttttactcagctccagaagcaccgcgggggcttgagccagttcccaaagaaaaaggaacggcccacctgacatccccagaaggagacgcctttggaagggagggggagttgctgcatgagttggagagaaaccattagttaccgcagggattcaacaaggttttcacaaagtgaatccggctgatgcccaagttactgatcactacacctcctaaaggggaatgtcagatattctccacctccacccgagctgtgaaggggcaggttagaggcaggttcccttcatgcagtaccccagattacagattaaagaggatttgctgcacaaattatccagggatcatctgctggaaggatagaagggagaggctgagtggctttaacagggcggtgtagccttgcctgtggctgaggacagtggggagggcctcaggagaggccaacccaggcgtgacccaggcccagctgggccactcttcctctgacaagcaggtgagatgccgaggggacagatgccccagaagctttagaggcattagaggctcagaaaggtcagagcagcagctaggggaaggcagatgcttggtgagtggggtgttggtgagggattccctgagctaagtagggtctgagctggtcaggctcctgtggaagtttccagaagcatgtcccttcctgacccgcaagacccctctctcaatggcaggctgactggcttctgcctgaatacactctggacaaaactgagacccacaggcacggccctctctgttggtagaagtgccagaggcctgcctgctgtatttcagtctgacctgtgaaccagtagcactggttgggaccagtcagaactcagccaggggagggaagagggcctggggcagcaggtaagatcaggctgagaaaaacaatggggctgctactggagatgttattggctgtttggcactggtggactggaagatggcagggtgttcatgagccagccggttgaggagaaaccttcctagctgggtggccttgagcaacttacttcacctgtcagggtctcaatttccatacctgaaaatgaggggattaaactagatgatttctaagcttccttacagctctggccttctaaaagtggatgcagtgggggaaggaggatatgctgtatgctactataggccttggaggaagataagagaacaaggcagcagcaggaggtgctggagaaaggttggacatgcagtgattcaggagagggcccaggatctgagtgaagggggaggacgtgtaggatgggggcagcagcttgggttccctgaaagggaacctctaaaggtacagagaggctcccggaaaagacctggggtagatcaggggatcggaagctgtactcaggaaaacaaagacataaagagagaaaccaatggcagttggaagtctgcagaagcagcagctgctgctaccatcagccccaaatgtcaagcttggactatacaaagccccactgttcaaagccctgggcctccaatactcatgtatgcactctaagaatacctcttgcgtgcttccagagtcctgtggcctagggtaaggagaaagcctacatcagggaagacaggccccagcagaaacccttgttttcctctattataacatgcccctccccgtggcctcagctgaattccaagtgtggacacagacacatttcaaaaggcagcccaaccagctcatcctcagctgtggctggaatcccagctcttctctggcacctgctgcccaggcagcaggttggtaccagcttgccttgaggaaagtgaggccccaagcaagtcctgggaccacggaacttagctctaagccaagaatattggggtctaatctctttctaatcactgtaccacaggcctaacatgaggcatgctgggtgaaataaaagctgaagactgactttgagccatcccacctgcacaagccctgcatgctaacctactgcagcattcggagagctctgagagaacttggcctgggcacaagtcccatgccaacttggctattatctcactgcctgaaagtcccttgccctctctgggcctctgtttcccccactgaaagagaagactggacttctcccaagtctagctcttacattctgtgtgatggaggcagggtctaatacctgcagggccaagatacagcagcccttgcgtcagtcactggggatttaccgagtgctcttcctcatctccagccagcaggtggcctggccaactctgcttcagcatggcttaactcttggagcgctagttctccctcaaaattcaacatcccaccaggcattgatggccttgactacagtacaactccccaggcactgctagggcatggtatctgagccaagtgtctaggggagtgtctagctgggaaactcagctcagccaccatagctctagcctgctgtcttgggctccgttgcttaggtcaggccaacatgatatgtcctggccccctccactaggtctttcctgcccacccataggtgcaggttgtatggcacaggacctaagcaaggaggctgcatgtgggccatcccagggcccaggttcaaagccgataataaagagcaattaccacaggaaatcaggatttcagatctgcatgactagcaatggccacttctgcctttcagtagctaagtttccctaaagtggcgcaagaactaattgtacatcccttccccagtgagatagatgagtcactgacgatacagtcagagagtccttggaccaaaggctatcactgggttgtgtctttcaaggaaacctcagcaagtctgtccaacaaggtctgtggtggacaaaggcaataaaccaaaatacattaagcccaaatcttcccccagctgctgccatgtgtcccatgatcctgggggcaggcataaggtgtgggtggcaaggctggggaacactgtgtttcctggcacctgctgaatggctgcaaagaggggcagttccagagctggcagggtgctagaagccagccactctgatagggcagacagtccttccaacaccctccgtgaacagggcagggccataggagctcagggttggaaaggacttacaaacctcctaatgtgactactcaccagatgtctgaaggctcccctgccttcccagcctctgctcgaatacatacctccgatggccaaaaattcactgattctaacaactgcccttcaacctttgggctgccaagttaccaaagtcttcactatactgagccaaaatctgtctttccctggcttttaccctccatatgcctccatgctggaagctttgctgactcatttcattggactttgctttgtcctttgatgtccacaccctttcaagtgacccatctgtatacttttctctaccaaattcaccacaagctcctcaagggcagggactatgtcttttcttttaacctctgctcacttcaaatcagcaaacatgtgatgtgatgtttttctgggtgtccaggcctctgcccccaggagatggctgatcaatatggattgactaaaaggactcattgattagttttccattctgattttagagcccagacaagccttgaggctctgcgcttcattgacccttcacttgcccttcatcctggctgctcacaagctcacacccacctcccagccccgtggttcacatacaaagacacagatgttactctcactaaaacctttcccttcacaattcttgatatctaaaggtgctgctgaaatattgagaagtattttccagggagacgtggctatagaagaagggtttctataccatatagttgactccctgggacagactgctccttaaaatgcttccagctttgatgaacaaactctgagcctcaatttcttcatctgtgaaatagggagaataaatccactcataggttactatgaaaacccactaatgcacttaacatgatcactaaatgaatggtagctattatctccattaataagaaaattatcaacatcaaaccagtaactgtcaactgtgactatttcaaatgccttccctccaaaggatttggagtgtgcatgtgtaataggtgtagagagatgggaggacagagaataccagagtaatgccttagattaaattgacattggaatgaccaagccgccaccacctgtggagtcagcttctccagctagacaccatctctagaaagctggtgcttggtctcagacctaccgacccaaattcccagaaacagccactgtggagacctctggaactagatgactttgccggcagtgggtgtgccaaggaagcgacacccacagtgtcagcctgagcttccctcaggaactgcctcacattctgtccccctcctccaggcttcattcagcccccaaggtgcagctgtctcctgctgctcccctaacagcagctgagccaaaggcagctgagcagaggagggtgaggggacatggccatttctgcctctcaggacagccttcctctggctgagcacctgtcagggtggctcctgggttacagatttacttcctcacccaagtatgcaccctggcctctgaagccaagctccctaatctacccaggcccactgtttctgttacttggaaaatccaccatttcaaacagcaccaaactactctgcagaaagatgtgatgttggagatgggtttcagtcaccacacaccttctgaaaatacaccaaaaagtccacaatggatgtggcagattcttccctatgtgggactattctgggcaaaacaaagaactaagggagtctggcctcagctctgctatcaagtctgagagaaaagcattgtatattcctgcccccattttataggcagagggagtaacctgcccaggtctcactgtgaagccaggacattgttccctctgtgcttccaggcagactgcaccacagcttgtattaggtgaccacctgtcctggtctgcccaggattgagggggttcttgagacatgtgactttcagtgctaaaaccagcaaagtcccaggcaaaccctgatgagttggtcaacttaccctgtccccaggttagcaagtcttagccagaggccaccagccttccatcctgctctggaattggctgcccatggtagctggaaatgaacagggtgccatctgacagggtaagatgcttgcttcctaagaagctgtgcaacaatggtcaaactgctataaaaatcctcccaaggccgggcgtggtgactcatgcctgtaatcccagcactttgggaggctgaggtgggtggatcacaaggtcaggagttcgagaccagcctgaccaacttggtgaaacctcgtctccactaaaaatacaaaaactagctgggcgtggtggcgggtgcctgtaatcccagctactcaggaggctgaggcaggagaatcacttgaacccagaa[140 bp omitted]aacaattctttcttctcaactacgagcctctgcccaaagcaagagaaatgccgggtgcagtggttggtgcccatagtcccaactactcaggaggctgaggcagaaggatcacttgagcccaggaattcgagattacagtgagctatggattgcaccactgcactccaacctgggcaacagaacactttaaaaaaaagcgagggagggttcctttcacatagcccatgacctaggattctgtgaacatcctcatgaatgtggaaactccctgagttcctcagaggctttggatttcgctttgtaaaggaagccaacctgagcaaaatgtccctgtgattcaaaagccaacaggaggctgatcatcccatcccttcagggtcacatgacatgtcatccaaaagacactgaggtctgccttaagtatcagtgagatggcctcctctgattcctggcctattttccagagttggtttcttgcataattgatagagcagagagtaaaccaccttgccctatgacagcctgagaagtcacatttaaggatgagtaggtcagatgccttgaggacacaggatcttggggctaacacaccctgtccatcaaaggcattgcagcccctcccatcagaactgctttatttccaggaaatccccagggctatgtgagaaggcagcccccagtgacccattagggcaccctcaggaccttcctgttgagcttttgctagttctgatccccaaaaaaaacccatcaggaatgcttcccttagtccagcataacctcctctggggagactcctgcccctaatgtcccaatccaaggatgagaagcatctgtccaccccattccttagacaaaagggctttgaggggccatttgggaagggactgacacttaaagagatgggctgaatcaggccccatccccagctgttcacccagagaggcttgtgaagctcaacaacaaacatgatgccttccacaagccaggcatcgtggccaggccaccagagaattcctgccaggaatggaatctggaacagactctatggtcaaccattcccagatcagaggaatcagaggccttggacaccagcaccacagcgtctccatcctgaggctgcatggggccatgccggctgagggacaggccggggagagcctagctctctcatgcattagagagcacctggcccatctccatgccatcctacctccagagagtcagagaagaccagcagcccagctgcttgggagccttcttttcttggcttctggggagcagctctgctgctgaacagggctggagagctgtaattatcgagaccggataagagctattttaggaaggagccaccctgttgccaaggcttttgacttcctaaactaaaacaagatgcacagaaaaaggggatgaaggtgggggagaacagggaggagcctgctcagtcaaaaacatcaaatcttgactgaagggaaatattaaccccttcccaaaggtacagatttgcatctaggggtgagcaaaaggctagctaagacaccaccatcccctggctttggaaaggagggcataacctgatccgctacccatctccctgcagactccctctctaagaccctccaagagcacttactcagcctgttccatctattttgacatttgagcacaaactatttcatattgttgtttaaatgtttcctgtctgtgttttatctccccaaccacatggcaagtttctcaaggccaaggaatgtgtgtgctgtgaaacttcaattcttcccctaaaagtgcctagcagagtgctaggcaactgaataaaaattgtttatggaaggaagggagggagagagagaggagggaaggaaggaagggagaaagggagggagggacttactgtcttgcatggagataatctctgaaagtagccactcccacctatagctgagctcagggcataaggttggataagaacccatggcagtggcaggtggcagccttgtttctggtcacctccccttcagctgttccattatctgagcttaggctgacccccactatgcactcatttgttttctatctgtggccaactgtccatcctgagtcagcctatgaatgggacctattagaggccattgctaggctttgggtaatagagaaatatggcaagagaaaataatggaagtaggaagagctttgaccatcttatcaaacatgggccaagaatagccaaagtacttatgggaacaatgcagcgaaatcaggacactgccaaatcaggacacgggactgctgacagcagagtccaccttgagtttttccaagttgaggacccaaatagtgtgtaacccaaaaaagcgacccctttctggaatgccccaggctgaaaagaggagaaccaggtggggactgatccaacggctacctagacggccttcccacagagcacttggcaagagtcatcatctgccaaaaggtctctgttctttctcggactgcaactagctcatacagtgcttttgtgcaaatccccctctggggagatgcggttccacaggtgcacagcttggcaaatggaacacaggttatatttcagccccccacttgccccctctaccaggtgctcttgtgcagtgaacaatctgcccaaccatagggagcagctctgtctccctccatgcccactcccattacaggacaggagatggatttggattgtggggtgggcccaggaagactgggagtaacctcccaggggcattcttacctcctcatctgtcataacagagtagaagccaggcattcccagggggcagcaaatggaattcagagagtgccaataggaggagaaaaagagaaatttactaaagatgcccagtggacttgggcaaacctggcccaatcccttcctagtgcaagtggcccaaacaacagcagctagtatttactgagtgctcactgttgccaagcaccgtgctaagtgttttattggtaataacttgtaataatcctcacaataaccctaagagggagccattattctcagtaacagatgaggaaactgaggcttggagaggtaaaataacttacccaaggtcacagtcagaaaatagtggacccagggcccaaatccagttagataactcgagttcgtactttactatgcccctactttatagagctttgctccctctgaggagcaggactgcccttctctgctctttgctgaccatcactaggagggttcatgctggttgggattggatggaattcccagggctctctcctccccaggaactgctttatccatagccctggcctctgtcatgctcatagggctggagtatattttgggccacaatgctcacagcaagaagtccctgctgccaagatttactccttgaggtcttgtccccaccctcccctgcccccagagaggccaagagtataaagggagaggagggtcacaaggcctggggacacttctcttaaggattctagagctgcaagacacactgatggcctcaagggggaggcccagacatctctgaagatcttgcctgggcagcaccaataagtaccccaggtggtaaacttggggcatgaggagggttctgaggaaccagagaaacacatgagaagagcccccagcctgaattagcgtgaagtcaactctgagcaagactgtgaagcaggcggtttgctttggtgtattttttaaaatcatgtgatagatgaccaactaagctgaaaaggccatgaggcttaaattattctccattccagaagtaacttcctgttaaaaggagactcttgaaaatggaaaaggttccaagccccaaagaaatgactctaatggtgaaattttcagcaagatgagaagttcctctgcttcttcaggtcaaaatcccagcatttatctcctaaacgacccagctctgtagatacatagatgccactcctcacctgtcctcccatcccccaagctcccacagtgggcccataggagggaaaagcacagaccttttagccaccagatgacacgattgtacatttcctcagagacatctgaaagtaacagagagatggttgcttttcttctctctgtgggatgcacatcccactctccactacttgcagctccctttctagctccacatttctccactcaaaggtgccctcagcccttggtcctctccaagaagctcctccagcctaggactatatatcgtattcccactctccctttctcttttttacaccctctctctgtgccactgtgaatgcctttcccctcctggaatcccagctcatctgcatcccaccctctccactttgtagccagagtatttacctgaggcccttattctatttaacagcccttgccagccctcaccccagctcagttcttcatccccactcaggaagcagctttcaaccctgcaagcccctctctactaccttcaattaaaaaggtaagcagtgttgcctggaggagtcaatgcctgtcgcccggcccaagcatccatcatcaatgtcattagcttggagcacagagaagctggcagggaaggaatggagcaataggctcaaggataggactagctttggcactggcaggagagcagcccttaggcccagaatgaagaggtggtctttcctgcccaccccaacatcccatctcactaaattggggctgcacctgggcagtctgcttcttcacatacccaggaagaaagcagtaaacctttgaatgggttgtttgcaggtgtgcttgggggtctgtggcacttcactcagtggtgcccaacttggaaactcctttggtggtgatggtggtgataggcttgccttctctctctggaacttcagatcctcacagaaagggctagagtctattttaaaaccggacaataaaagatctagggaaggagagcacttaggctcaaaatccggtgttgtcagctggctttggggtgtttcaacttcaggattcagcaagggccaccatgaggagtcaggtccgtacctaggtaaggaccgaggaggcaagggcctaggggtcagttccagttctgcatggatggagggcttttgcgagagttctggatacctgggtgtaggtccttgggacatgtaagtaatttctgggggtttttgggtttgctgtttatagatgggctctggagtaacaaacatggatgacttgtgggagccctcagacactgatggaactgtcacatggtgagttggctctactgactgtacccctggggagatggtgaccctgcggccaacctcgctgtttcctcggattggggtcctcacgttggactccacctgtgatgatactaagacctttgcggagggcttggtttcaggataggcagaatacttatgaagagactcagggtctacccgtgcagaaactcggtgtacaccatcagaatctttaaggacagagagtttgagcaatgagtccaagttcatattcctatacaaggccttgggttttgaaggaattggaccgtaaggacctgtttctgattcttctacagggacccttctctgggctgtctgatagtctgcagagacacagctgcttccgtgctctaggagagagggactccttggagatctgatctcactagtagtcgtaattctttggatgggctcagtttgtactgcttcatcctttgggtaagacaaaatcctacggggaactctgactccttgggggttctggaccttggatggtgggtcatcttctaagatttgtgattgtaagttattcttctggtcttgaaaactcaactgatgagtagatttggcatctgggattgatgaagcatgatggccgacctcgcgccctgacttgctctcactgcctcttcgtgctgcttcctctctgggtggactaactttccattgtctgcttgaagcatgggaagccagtgtctgagtcttctggctctttagatggggagaggaatggcgggatgattctgttcttggtccagtctcgggtccccgaggagtgggtactgcatagtgtccaggtcctgactggagggagacagatcgagggtagtctgatgctgaatggggagtggtgggatgtgcagcttctgatcttcggtgggaagggttcagggagactgcagcacttcgatggcttgaggcaagaacgtacccatgtccctgctgaggggatgtgttagtagtaacctcagaccctctctgtgctgaaaccgctaccttggccccaggtttatttgtcttgaccatctgatagattgtgcccttctgagtagatcccgtattttactggctggcttgtattcaggatcctaatgatgcctgaatatttaccctgttttaaagctgctgtttcttgggctcccacaaaagtggctgttgttctaagagtgtctcaaataatccccttagctacctctctgtctggtgatgtcataaaggaaggagcttccttcctattaaacatcctagtgtacagccacaattcttcacagaatcccaaagaagtacctgaaaggaatctgtggatttgtctttggagttatatcaccaagcctttggcaagtttttaacaaaactgggatttccttgtacatagagaaggctccagaccctcctttactctcccgagattctagaaattctcaggactcatccagagaaggaatcagccagaagatcctatgaagacaagatcaaaccaaacacgctgtgttcgccccagttttaataaggtacgaagtacaaagttgccccaattttgtttgaaactgtactgtatacaagttaaaaaaaaaaaaaaaaagagagcttcagctttttccaggtctcatggattgtttcattgctcctggggtaaaaatccaggttgctcaaataataaaattctcaca[139 bp omitted]agcatgataaaaccccgtctttactaaaaatacaaaaaaattagccaggcatagtggcaggcacctataatcccagctactcaggaggctgaggcaggagaatcgcttgaacccgggagttggaggttgcagtgagctgagattgtgccactttactccagcctgggtgacaagagcaaaactccatctcaaaaaatatatataaataaaaacaaaataaaagggatttgggctgggtgcagtggctcacacctgtaatcccagcactttgggaggctgaggcgggtggatcacctgaggtcaggagtttgagaccagcctggccaacatggtgaaaccccatctctactaaaaatacaaatattagccaggcgtggtggtgcgtgcctgtaatcccagctacccgtgaggctgaggcacgagaatcgctggaacctgggaggcggaggctgcagtgagctgagatcgtgccactgcactccaggctgggtgacagagcaagactccatctcaaaaaaaaaaaaaaaaaagaaagaaagaaagaaagaaggaatttggagttaatcattggtttccatcataaatgactacaggtgtacctaggagaaattacctgccttccctgggacttggtttcttcacctggaaaccactgcctggtacatgggtgtcacacaacaaatgttaatgtcctttctcatgatcctgtcagctatccaatcagccggactccggttctctcttgaaaagtgactttccaatttggatgaccattttggaggagactctgtcacctttctctccctttcacatgctctttctctcattctctcttttagacatagactctaccatatccaaaattctattatgaactctgaagggtcattgagattataggatggtcagcttcatttttctttttttttttttatttgagatggagtttcaaataaactgtgcccaggctgttgcccaggctgcagtgcagtggcgtgatcttggctcactgcaacctctgcctcccgggttcaagtgattctcctgcctcagcctcccgagtagctgggattacaggcgcataccaccatgcctagctgattttcttttttttagtagagatggggtttcaccatgttagttaggctcgtgtcaaactcctgacctcagataatctacccacctcggcttcctaaagtgctgggattacaggtgtgagccaccgtgcccagccagttttaagtatttctaaaccctttctattccccaaaatgaaagcagctttggctaggtgtggtggcccagcctgtaatcccaacactttgggaaactgaggtgggcagatcactttagctcaagagttcgagaccagcctgggcaacatggtgagatcccatctccagcaaataaataaataaatattttaaaaaattagaaaacagttttacaaataattataaaaagttgaaatcacctaagaggaccccgttactattttaataagcatctttccacatttctttctatgcatttactatgtagacatttaattataaatttacatagtcttattataaacttcccagcatcctagtactagcattattccataacatgttatgaatacctttctgtcaataaatctgtatctatgatgtaatttctaattaatccacttatggttgttccagaatgtttcaaatgagtcctttactgctggacattaagttgtttcttttttttcttgctatggtgcccaggctggagtgcagtgtctgttcataggcctgagcacagcacactaaagcctcaaagcttctgggctcaagtgattctcctgtctcagcctactgagtagcccacctcatttgggttgtttctaatttttcaatattataaacaatgttgcaataaacatacattactataaatatatatttgtgtatattccaattttctccttaggacaatagttctaaatcctggctgcacattagaatcacctggagatctttcaaagcccatgctccacctcagacaaaatgaatcagataatttgggggtaaggcttgagcaccagtatttttttaaatgcctcagatggttctaatgtgcaaccagggtataaagttctctaaatcctctctattcaaagtgtagtccgtggaccagcatcatcagcaccacctgggagcttgttagaaattcaggagcttggggcccaccttggacctacttagtcagaatcagtattttaacaagaccctcaggtgatacatatgtacaatagaatctgtgtcatactggtctaaatggagtttctgggtcaaaaagtagtcacatttaaaatacatactgacaaatatcctccagagaggtagtaccaatttatacccccaacacagtgaatgaagatgtctgtttccccatactctcagcaaccttagatgttatcaatacttgtcctccgcaatcagtgaggtaaaaaacaaccgtgttttaatttgcatttctttgattacaagttaaactgaacatcttttaatatgctaattggctgtctgtacagcttcttttgtgaattgttctttgtctatttttctattaaggtgtttgtctttttcttacaggttattagaactctttgtatattagggatataaactttttgtttatccaatatattgcaattatttccacccagtttgttgactttatccttgtccagacattatttgcagtaaagaagttttacattcttaattcccaaactttatactttggtatgttttttggactatttgggttttttgagtttttttgagacaggatcttgctctgtcacccaggctggagtgtgatggtgtgaacacagctcactgtggcctcaacctcctgggctcaagtgatcctcccacctcagcctcccgagtagctgggaccacaggcatgtgccaccgcacccagctaatttttaaattttttgtagagatgtggtctcactgtatttcccaggctagaaactctctattatgttctataattcttaccattcttatgccaatgccatactgtttattgcagctttatactacaccttaatatacggtaggacaagtccctcctccttactcttcttttgcagcattgttttcaaccatgcatttattaaaagtcctttaattttactctactatacaattagtagtatccagtaggagagtggattttacttatttaactcccacaggaccaacttatttctgagctcttggggggcacctcactataacccacttccaataccaacatatatgagtacataacattaccattagcattcagaaagaagccaaaagtaatgtatttggaaaagagcaattgaaatttattccaaaaatttctttttttttttaaagacagagtctcactctattgcccaggctggagtgcagtggcatgatctaggctcactgcaacctctgtctcctgggttcaagcgattcttctgcctcagccttctaagtagctaggatacagacgtgcaccaccacgcccagttgatttttgtatttttagtagagaggggggtttcaccgtgttgaccaggctggtttcgaactcccgacttcaggtgatccacctgacttggcctcccagagtgctgggattacaggcatgagccactgtgcctggccttattctgaaaatttctaataatccaaactttccaagggtactctagtaatttcattcaacagtgaaccaatgtttataaatcatctatgggtctagaacttgctacgtattctctctgctttctcatcttgaaggacttagtacattctaaaaacttggcacaaaacccatagaatagatgtggagattgggatgaggttcataaaggacgtgtcaccacagtgtcagtctgctttctgttgctataatagaaacctaagactgggtcatttcttaaaaaaaaaaaaaagaagaagaaatgtaggagtcaggagacctgcccctgaccaacttggaccttggtagtagcacatccagttgggggatggcagggagagctatctgccctgtataagcaataaaagggtgcatttggccaggtgcggtggctcatgcctgtaatcccagcagtttgggaggccgag[132 bp omitted]gaggtaggagaatcacttgaacctgggaggtggaga[132 bp omitted]gaggccacatctggtgagggcctttttattgcatcataacatggtagaagccttcacagggcaaaaggggctcacaagagagaaccaaagtggcttttataactagccaacttccatgataacccattaatccattaatgggttaatacattcaagaggattgagcgctcatgacccaatcacctcttgaaggcccacttcctaatactattgcactgggattcagtttcaacctgagtttcaagaggataaacattcaaaccatagcaatgagttttaacttgaagttggcccttggttcattcacaatcctgaaactttgcttagggcactcttaaactatcgtctcagggtaagctgttggtggaagggctgaggctgggcttgcttgtctgacactccaacataagctactgtgttttactgtaagtacgcaaattaatgtttagtatgatcttgggaaggtcatggaaccctctttgggtagtctcttcttttgtaagtagtaataatatccaacttttaggattattctgaggattaaaaatactcagttaccaaatatttgttgagcacctaatatgtgcagattctgtgccaggagctggggatacctcaatgaaccacccagacatgatccctggccttgtggaacttaacagttgtatgtaccacaggtggtggtagaacattctattagcttttaagtgtgctacatgctatgaaataaaaatgtggttacgggctgggcatggtggctcacacctgtaatcccagcactttgggaggccaaggctggcggatcacgaggtcaggagatcgggaccatcctggctaagacagtgaagccccatttctactaaaaatacaaaaaattagccgggtgtggtggcacgcgcctgtggttccagctacttgggaggctgagacagaagaatcgcttgaacctgggaggtggaggttgcagtgagctgagatcgcaccactgcactcaagcctaggtggcagagcgagactccatctcaggaaaaaaaaaaaaaaatgtggttatgtgtgtcggcagggagagggcaggcaagaaaaatgcgagtatcttacagagggccctaacctagtctaaggttcatagacttcaggaaaactccctgaggaagtgaagtataagtaaattaagaaccgaacaatgaggtacctatgaggaaggacattctgggcagggagaacagcatgtgccatgaggtatttgaagaactgagaggaatccagttatgtctaagagctatgggcaaagatcttaacaaggaaataaaacaatttttttcatgttaaaaagatcattgtagagacaaaattagagaagagagagtattaaagaaatctttaaaaaaatgtaactcagtttgttttaccccactctgtcctcttacttagaaccttccactggatttccactttttgccatggtctataattcccctgctcagtctccagcctcacttcatctcctgtcagcctccctacaggttattctactctaccagcctccccccagattagtctcctccaccaaactggccttctgctgctctaatttggtgtttcctgtggggcctttgcacttgccattcccttgctggcatgttcatctcccagagtcacaagactggctccttctcatcattccaatcaaagctcaagggtcacttcttcagatcaactttcccttgaagagccctagctaatgttaagttgctccccaacccaatgatcactgtaacctatttattttcttcctagcatttactgtttgttcatttaactccaggacggcagggactctgctttgttcgcgatcaccccagcacctaaagtagtgcgtggaacataggagtcattcaaaaaagatctgttgaatgtgagactggatgggagcagccacttcaggaggctgttgcaatggtccagggaggaattaattatagtctggattagtgtagtggcaatagaaatggaaagaaatgggtataaaagacatagattttagaggcctcttgaatagctgggactacaggtgtgcaccactgtgccttgccaatgattgatttttttttttttttttttgagacagtgtcctgctctgttgcccaggttagagtacagtagcactatcatgggtcactgcagcattgaactcctagggtcaggcaatcctcctgtctcagcctctcaagtagctagaactacaggtgcataccaccacacctagctaatttttaaatattttatagaaacagggtcttgctatgttgaccaggttggtctcaaactcctggcctcaagcaatccccccacctcggcctctcaaagtgctaggattacagatatgagccaaaacacctggcctgattgatttttttatgtaaggagtaaaggaatggaaggagagtcaaggatgactcctgtaaaatttgttattttctggttagagtggctgactggacagcaataccactgattggaaggggaatactggaggtggagaaagttaagactatgagttcagtccaagtggagacatcaaatatatgggtagtaatatcagctaagaagagaaatctagtcctagactacaatacaaatctgggagctgtcagtgtatatatagacactaactgaagccatgggagtgaacaaggtctcttaggagaagaacttgcaatgacaaaagatagaggtggaacccccaaaggaggctgaggtggagtaatcaagagagatagaaggaaaaccagagtgtgacatcaggaaagccaagggagtaggcaaagagcaaatgacaaggaggccaaagtgtccatcagatttaggagtaagagtcgctgtgattttttttttttttaagacaccatcaagctctgttgcccaggctggactgcagtggcaggacctcagcttgctgcaacctccatctcccgggttcaagcgatcctcctgtctcagcctcctgagtagctgggattacaggcatgcaccaccacacccagctcatttttttgtatttttggtagaaacaggattttgccatgttggccagactgatctcaaactcctgacctccggtgattcacccgccttggtctcccaaagtgctggggttacaggcatgagctacagcacccgacagagtcactgtgatcttaaatgactgctagagaatagaaggagtagaattcagattctaatgggctgaggagctagtgggaggtgaggcactaaagatagcaggtgtagacaactctctcaagaactcttgtagcaatgggagtagagagattagacagtagctggaaaagtaggtgagatccaggaaacgcttttcaaagttaggaaaatccaagtgtgttaatgctgatgaaaagaaaagcagcagccaggctcagtgacaacagcctgtagtcccagcaccttgggaaacggaggtaggaggattactcgagcccaggagtttgaatccagcttgggcaacacggtgaaactctgtctcaaaaaaaatgaggggtgggttgaagctactgaaaagagaaattataagctgggaaggatacccctgaatggacaaaagatgatattggccaaggacaggaagagggacacctccttcagtataacaggaagagggatacctccttcagtataaaaggaaggaaagtgaaaagaataggtgtagaataagtccatctctagtgcagggcagactgcttcacctacaactgttgttctgttctgcacagatagatgtggccgtgttagtagttttggtttggtggcaggcagctgagttcattcccatctgatggcttctatttt[145 bp omitted]aaccctgtctctactaaaaatacataaaaaaattagtcgggcacggtagcgggcgcctgtaatcccagctactcaggaggctgaggcaagagaatggcgtgaacccaggaggcagag[264 bp omitted]atggtgaaaccctgtctctactaaaaatacaaaaattagctgggcatgctggcacgcacctgtaatcccaactactccagaggctgaggtgagagaactgcttgaacccaggaggtggagattgcagtgagccgagactgtgccattacaccccagcctgggtgacagagcaagactccaactcaaaaaaaaaaaaaaaaaaaaagaaaacacagtggggctgctatgtgcaagaaaaggattaatgtatataaggtaaccggcacatcatagttgctctataaccaataaataatacctgccaacataatcgttaatattggccaatattacagtcactggccagacagaagagtctactctgaataaaggagattacaatccttatcagcaggaacttgtatactaggacttgtagcctttatgaatactaataattaatgccataataatgtagctcatcatttatcatgatatgtctgctattggtcctttcatttgtacgtatgttggttttgtctcatcaattagaatatgttttttgagaggaagatggtgtattttaaatccctgtatcctttaaagtttcttcacccaggccaggagcagtggcttgcacctgtaatcccagcactttgggagaccaagacaagaggatcacttgacccaggagtttgagaacagcctggcaacatagggagactttatctctattaaaaaatttttttaaaagtccaggcgcagtggttcacacctgtaatcccagcactttgggaggccaaggcgggtggatcacctgaggtcaggagttcaaaaccagcctgaccaacatggtgaaaccccatctctagtaaaaataaaaaaattcgccaggtgtggtggcaggcgcctgtaatcccagatacttgggaggctgcagcaggagaattgctggaacccgggaggcagaggttgcagtgagccgagatcatgccattgcacttcagtccaggtgacaacagcgagactctgtctccaaaaaaaaaaaaaaaaaaaaagccaggtgtggtggcccatgcctgtagtcccagctacttgggaggctgaggtggaaggatcgcttgaacccaggagttcaaggctgcagtgaaccatgatcgtgccactgcactccagcctaggcaacaaagccagatcctgcctctaagaaaatcaaacttttcttcacctggtattatttataaactaatttgttttctggtggttttcctctggttaccatagcaagcaactgtttccttactttaaaatggtcaaatagatttataccttctcattttatctgtgcaggctaaaatttctgagtgcaaagaagtaggaatacaaccatccacaacaagaactattcagttttcacaaacaaaagacctactatttactcaccaagacagaataataacatgttagctggctagtactgcacaacagcacatagcttctaagaaaatgtttttatttatggccaggcacagtggctcacgcttgtaatcccagcactttgggaggccgaggcaggcagatcatttgaggtcaggagttccagaccagcctggccaacatggtgaaacccgtctctactgaaaatacaaaaattagctgggtgtggtagtgtgcactgtggtagtgcacacctgtaatcccagctacccaggaggctgaggcacaagaatcacttgaacccaggaggcagaggttgtagtgagctaagacggtgccactgcactccagcctgggcaacagagtgagactctgtctcaaaaaaaaagaaagtaaaatgtttttattcattatgaagattccaaactggaggtagatgaaggtatataaaaaatctgcatggccgggcctcaggcctataatcccagcattttgggaggccgaggcaggtggatcatgaggtcaggagattgagaccatcctggctaacatggtgaaaccccatctctactaaaaatacaaaaaattagccgggtgtggtggcatgcgcctgtagtcccagctactcaggaggctgaggcaggggaatcgcctgaacccgggaggtggtgg[134 bp omitted]atgctatgatcttagtggtacaatacaaaatatatggagataatatttgttcaccttaatgagttcaaactatcttaggactttactgctacctgtacttacttttttttttttttgagacacggtctcactctgcacccaagctggagtgcagtggtgtaatcacggctcactgcagcctcaacctcctgggctcaagtgatcatcccacctcagccttgcaagtagctaggactacagacatgcaccatcatgtctggctaattttttaattttttatagtgacagggaactccctctgttacctaggccagtctcgaattcctgggctcaagccatcctcctgccttggcctcccaaagtgctgggattgtagacgtgagccaccacatctggccactacctgtactttgattgtgtgagccaattctagctggaatgggaatatggcactctcagccaagtggatgggctgtagttctgttatgagacacagatgactggtaccagtatatataatgggtggtagcggtagctgcatatttgtcagaaattgaagcctctttgggtggcagttctccccccaactcccaataactcaaattcagaaatatatcttacacagcaaaatctgttattaaaattaaacattttattatataacaagagttaaagtttttgaaaattaacatcaacaaaaccaaagccattctaggcacaaccaaaaatttttactatcaaaactacctctcacttttcagaaatctgactgaaaacaaatggttgaatgtgctgctaacagagagggccaaacgatgatgtctattgtggcagctgaacaaagtgagacttacagaactggaactgctgccctgacagcaactgaagcagaaagagaagaaaggagcttacaaccaggacactcaaactcaggccaggagtccgtctatgatccaattccaatcagtctgacaagtcactctgatccagcacgattatcctatgcacatgttttttaaagaacaaaaaaggaagtttcgagttggtatgtgtgttttttaaagacacaaaccacatcctctttctattcaattaaattcaagggaaaggaattttggtctttataatcaagggcgattataaccaacagtgtgtcatggaaatgcaaaatgactacagagcaattgacagcagcatcttctgtattctctccatattaaacctgttctttttttttttttgagacggagtcttgctcttatcccccaggtggagtgcaatggcgcgacctcggctcactgcaacctctgccttccgggtttaagcgattgtcctgcctc[210 bp omitted]acttattgaatcaaagttggcattaatttcactttatagtttaattaactataaacactaacattttaaaaattaagcaactttgtctaaattggagtctttgtcattaatgtgtatttagacactggtaaatgtttttaagtctgcttctgttgtctataaacatgacttttgatctacaaacatctgatatttcattacctggatgattcggaccaacctagtcgcttccaaaaacaggattttagttcatcttgatgaaatataagaggaaggaaaaaacaacatgattaatttctaggtcaaagggtgccagtattcatattagtgctccctctaatttagagtagactgttttacctacaatggttgttatattctgccagatagactctttctaaaaacacaattaatgggcttcccctcctaacattctatagttttctgccacagcaatgggcgctaatgacactaattcacaaagtccctgtattatcttctcagtgaaatcaatactattaatagctaaatgcctacacgttctgggccctgtgcagtcagggttctggaggaaacagaatgtacccacggctggttcaaataaagatccttagtgaagtgactacatacagaggtttatttagagttaagggaacaaacaaggaatgtcaaggcatccagtgattagcagcagtgggaagcctaagtctgaaggaactgagtgttggagatgagaggtcagttactagaccttaatgagagctggaattgggaagaatggactgcctacagaagccgcacttgtggagagacaccacttctaccaggcacaaggtgctgaagtaagcagtgaggcaaagtaataccccaaattctctctagccccactaatcttctgctggggcctgtcattggcaaacaggaagcccaggagatgcagtccactagggtcagcattctggggcacaaagcagggcagagatggggagaatgagaaggaaatcaggaagaggtgaaaggaataccagatgatctgaaagagttaaagtctcttactttcctgagtaggaagaacttaaatatgggagagcgtcattgtaaagggcatatcagaagccttcaaaatctatcaaaatagttttaaaattaaggttaatttataattttcacattacttgtagactccacttaaattccataaaatatgatttattactggattttgaagcatctatgtgagctaaatttaaaactctttgga[212 bp omitted]gaggcaggggaatcacttgaacccaggaggcagaggttgcgatgagccgagatcgtgccactgcactccagcctgggcaacaagagtgaaactgtctaaaaaaaaaagaagcagcaaaacgtctccccagacaacgtgcaagataatgatgatgagactgggcaaaagcttgctttggaaatagaattggatgttattactgtttttgtgataaagctatgattggcaattaacagaaaacctgagctgaactgcagagaaaaataaattatcaaaggtaggaggattatgtatagcatctgggaaacatttctaaataactttgaagcacatcaaagcccaaggactacagactacattataaacatacattaattcataccttcttcagaagtccctagaacaccctctgatttccttctttctggtgtaatgctatcttccctttttcttttctcttcaccaactttttgatctttgatatttgtctccctgtaacaacaattatttggggaatcaaaacgtatacacaacagccaagaaaacaggactgtactcaaaacaaaaaacaaacaacaacaacaacaacaacaaaaccatataatagctagcactaacaagagtgttctctatgcaccaggcattggtttaagtgctataatttaactcatttaattcccataactatataaggtagttaccactgccatccccattaagcaatgaggaaaccgaggcacagagaagttaaattacacacctaataattcctagagctagactctgaccttagactcagtctgccttagactctgctttcaaccactatgctatactgctccaaaggaaaaaaaaggcattttacttaagttttgattggtgtccctttcaaaaccatcatttattttatcatcttatcttcatttcccgaaactctctcctaagtgaaatatgtaaataatttaagtacctcaaaatttaagaccatgtttgtcaatctattaagcagaaaccatccccccgacccaactggaaactccttataggcggcagagccatcttatccctctttgtggtacctctagcccctagcacagtgctttggacattgtcagtgctcggtggatgctggttgaaccaaaataacattgtttagggattcttctgttttcatttggtggatagtcaaaacaaaatacgtaaaatgagagagaaaataaagccagctagagtgaagagagattttttcccctcttaatattttcccactaatagaatcacaggttcaagagttggaggaggcctttgggttatattccgcccccgttcaaatgcccaggacagggaatcatccagccactgcctgagcagcagtaaccattactaaaataagtgtaaaggcaggcagctatttccctttatcagatagctgtggctattaggtttgtgctttattgaataaaaatctgttactctgcaatttctagtcactaattagtcttctagggcagacaagtaagctgactctcttcactttgcaatatttcaggtatttgagggcagctatcaaattctccattccatctgcctttctcaggctgagcctctcagctccttcagctgttctcatatgacatggtttccagacctctgactgttctgtagccacactcttgtgtttgttaatatcccttttaaaatgtgatacccagaatggagccccacatgtgtcctaggactcctctgaacagcacattaccgtcatctggacagtacatttttatatatccagcatcaatgctgcattgaccttttcagcacttcatcaaacaggcctcacagagtcattgcccatgccttcctcaggaagaatttcttgacttctcatcatgtctcaagatgcatggctcattactgggcatacaaaaataagacatacttcttgccctcagtaaaattatagtgagcagaagcttctgatgaaaacttctccagttagaccaggtctcacacattctgtaattttggatctttgacctttatcttttacagaatctaacatttccacctgtcaagatgattttgaatcctcagtctatcactcatcacatcagcattcattcctagatttgtgttatctaaaaatttgataagcataccttttctgatttaattcacatgactgatgaaaatgtcaaaggtagcagggccaagatacagcaaacttagaagcctctgtctataatgatatgaatctgctaatcaatatcttgagtactgtgggtggtcagaggaagaggggcaaatatgagtgcagacaggtggagtcagggctggcttatctaaatcaatgtaatgccatcatcaggcattcattctccaagaagtctaaaacctagccccacttcctgaaaaagaagaaaaggattcccctttggggaacaataacctttcagagcccttgggaaggtcttgtagctccacgctctcctcaggtggctgcagccatctttccaggtcctcatccagagtagagtgagctctgtttaaggacaagtgaagagaatggagacaacagtcatttcccatcccccttgacaaagatgcataacactttagagtagaaagggaccttaaaacctgtgctttcactatatgtatgaaaaaacaagagctcagtgagattgtgtctggagtcatagaggtcacttagatctgactgaaatatgcactggtcgggtgtggtggctcacatctgtaatcccagcactttgggaggccaaggtgggtggatcacctgaggttaggagtttgagaccaccctggccaacacagtccaaccccatctctactacaaatacaaaaatcagccggcgtggtcgcgtgcgcctgtaatcccagccacccgggaggctgaggcaggagaatggcttgagcctaggaggcggcagctgcagtgagccgagatcacgcgactgcactctagcctgggtgacagagcaagactctgtctcaaaaaaaaagaagaaagaaagaaagaagaaatatgcaccaaaatagtcctttaatcccttgacaaaaagccttagcacctattaagatcactgcttccccaagtctgatggtagactctgtctcaattctaggtcactgagttagttttctacctgaggctagaactatacatgctttcctacatgtttttccaagaaaaggctagaagatgcagggtagagtattttaagaatgcctgaaagtcctgctcatctgaaaaaatgtcttccactctggcttggtgcctagattgatcattcacagcactgagatgactgagcatctgtggggcatctatctgtggccagcactgctggcccttttggaagaggaagagacaacaataataatagct[132 bp omitted]ctcctgcctcaacctcctgagtagctgggactacaggtgtgtgccaccatgcctggctaatttttttatatataattttagtagagacggggttttgccatgttggccaggctggtttcaaactcctggcttcaagtgatccacccaccttggcctcccaaagtactgggattataggtgtgagccactgcgcctggcccctgtaatgtcagcactttgggagtcccagttgggtggatcacttgagctcaggagttcaaggccagtctgggcaacatggcaaaaccccatctctacaaaaaatacaaaaattatccaggcatgttggcatgagcctatagacccaactacttggcagctgaggcaggaggatcacttgagcccaggagatcaaggctgcagtgagtggtgttcatgccctattgcactccagcctgggcaacaatgtgagactctgtctcaaaaaaaaaaaaaattgcactaaaatattacttattttgactactgagtttttttggtgctcccttcaattttgtatccaaggagtctatctcctgagctcaccttaacctagtcctggccccgaataatgatagttcaagagaagtcaagaggcagaggaggtgagctgaagtagtttaccctacaacacaggcaaaaagagctccaaatcaggaacagagtcaggtttcttgaggcaaccttgtacttttagactgaattgtctggaagactgcccccattttctcttctaaggcctttaactaaaatgttttgaaagagactgaaacttgtgtttgcctaacaaaatgaagtaaaaataaacaaacaaaaccctaaaaacaactcaagagaaaataacaacaaataaccctatcaaaaaataggcaaagagccaggcatggtggcttgcacctgtagtcccagctacttgggaggatggggcaggaagatcacttgagcctaggacttcaagttcagcctgggcaacataaagcccatctctaatttatatatatatatatatatatatatatatatatatatagagagagagagagagagagagagagagagagagagagagagagcgcaagatcatacatatgtatgtatatagagagagatcatacatatatatgtatacatatatatagatcatacatatatgtatacatatatatgtatacacacacacagacacacacacacacacacacacacagacggcaaagaactcagacatttctccaaagaagatatacaaatggccaacaagcacatgaaaagatgttcaacatcattaatcattagggaagggaaaactaaaactacagtgaggcaccacctcacacccattaggatggctactatatttaagaaaaaaaaagcctccacccccacaaaaagagagagaaaataacaagtgttggcaaggatgtggagaaactgaaacccttgtgcactgttggtgggactgtaaaatgaggcagctgctatggaaaatagtgtggcagttcctcaaaaaattaaaaatagaattaccatatgatccagtaataccatttctgggtatatatccaaaagaattgaaagcaggatctcaaagagatatccgtacactcatgttcacagcagaattcttcaccataacaaaaggtggaagcaacctaaatgtccatcaacagatgactggataaatgaaacatattattcagccttaaaaaagaaggaaatgctgacacgtgctacaacacagatgaactttgaggacattacgctaagttaaaataagccagtcacaaaaagacaaatactgtatgatttcacttatgtaaagtatcaacagtagtcaaactcatagaaacaaaaagcaaaatggtggtggccagggtgtgggaagaagagaaaatggggagttttaaaatgggtatagagtttcagttttgcaagatgaaaaggtttgggacattagttgcacaacaatgtgaatatacttattaaggttattggactgtgcacttaaaaatggttaagatggtaaattttgttatatacattgtatcacaattaaacatttttaaagcaaaaaaagcaacgctttttaaaaaagtaaccctttaggaataggggctattaggatagtatgaaaaaagaccccactttttttctttcttatttgtcaatattagaaaaaaacctaacataaactatacaattttttaaatcctttcaacagtccagcttttcctgttacctctctgtgtcctctccaagatcttcagtttctttggacaaaagcatactactatcttcttttttactgtcagtttcttgttcttctaagtgcctttgatctaaaaacagttgaaagaattaactttattagaacgaaaaaaaaattgagaaagcttgccttaaaatagagtgcaaaaattaaggccaatcagtggtccctgaagtgtgcaatgcattagctcccctcttcccaggagagcagggggccaggtggcagtctgcaggccacctgcatttgcagcagctgcttctggggtcttggaagcttttcagtgccaggtgaagctacaggaaaccttgcttgtgccaaggctcaaggaagacagaggaagctgaagaaagaaagggcacataaaagaggaggcaagcaaccatgaaaacaaattgcacaaatttactttggggaccatcttgttctcacttgttagatgtttctaacttggagctccaggaaaggaatttgggtggggaagggatgtaccctttaatgtatgccaagcattttacatatgctatctcattccatcctgccagcagtcctataaagggaagaggactaacatttgctaagtatttgaaaatgttagtacttgtacatggctctgtacatggagctaatatgtacttcatgagacagaaattattgtccccattttacagattaagacgactgaggctcagaaacagtaaaacagcttgccatacaaataactataaagtcagacttgaggtggagttgtgcctgacctcaaggtcacacttccctatatgtaccactgtgttgccaaggacagcgttaaaagaacctgatgaaaacaatctaggtagttcacttaccatttgcagtgcctcctccatcacttgctgtgttctcatgcaacaccgtggatgagccctgctgctgtttcaagagctctgtcacaacacaaaagccaaaggaaacttatttcctcccttgcgtgtcctgccgttctctagagcagtggttctccaagggtgatccttagacttgcagcattaacataacccgggaactcgttaggaatgcaaattctcaggcctcatctcagacctgctgaatcagaaactctgggggtctagcaatgtgtgttttacttagcccttcatgtgattctgatgtctgataaaatttgagaaccactgctttagggcattccaggtttgaaaggaattctttaggtatgacaaaatcccacacaacactcaaaatagaaatgatgatgatcatacataacacttgcagaaccccaggtgtcaggttctgtttctaagcactcgcatacattaattcaggatgaatgttcacaattaatcttcacaacaaccctctgaaatagactgtgttattgttactcctatttagcagatgaggaaatttaggttaagaaacttgcctaaaaatcacacagacagtaagtggtaaaattggtaaaaatccaggcagtctagctctaaggtttatgctcttaatctctattttatagtctctcaaaaagttagtaacatcaaaacaatctaaatgtttccccatctctattcacctatatttcatacttttttcctggtttatgaaaagacagaaggcaggctgagcatggtggctcacgcctgtaatcccagcattttgggaggccgaggcagggggatcacttgaggtcaggagttcgagcccagcctggccaacatagtgaaaccccatctctactaaaaaaataaaaattagccgggcatggtggcacacacctgtaatcccagctactcaggaggctgaggcaggagaattgcttgaacccaggaggtggaggttgcagtgagccgagatgatgccactgcactccagcctgggtgacagagtaagactctgtctcaaaaaaaaaaaaaaaggaaaagaaaaagaaaagattgaaagcaaagaatatccatcatttccagttcctaaagaaatactcagcctggccaggagcagtggctcacacctgtaatcccagcactttgggaggctgaggcaggtggatcacctgaggtcaggagtttgagatcagcctgaccaacatggtgaaccccatctctactaaaaatacaaaaaattagccaggcatggtggctcatgcctgtaatcccagctactcgggaggctgaggcaggagaattgcttgaaccctggaggtgaaggttgcagtgagctgagatcactccattgcactctagcctgggcaacaagagtgaaaccctgtcaaaggaaaggaaaaaggaaaggaaaggaaaaaggcaaggcaaggaatactcactagactaagacaagcatctgctaactcagtatgctgctttatcctcaaagtgctctgcaaagcaaagcaagttgggaggcagcatagacaagccaccctgagctcgttggcatggtcctcttctgtgctggtgcaggtcttctcccttcctgcagtgcaggaagcagtcctacctggcagccatgggtgtcaagggtccccataagatcatttaatataatttgaaatttaaaaaatccattttcgtccttgttaaaagtagtcctgcgcagatcttaaatgatcatctgtatcctagttctaaagaaccttccactttaggcacctgtcaggagcctagagctttggatgtgagccctccaaaatagcagttgagagttccagtaactccccaaaggtctctttaagggaaacaacagagtgatgatatatagtaatcaggcaggcaagcccattatcagaagaaactactcaagtgccctctgccctttatccttctgcaaaattactgacccatctcaaagtgcagacattacctagaaacctggtccagataattcccataagtgaaatgagggaaggcttctgcagactgtgctggggtgcagcagcaccataaggccagagcccaggacaaagtctggtaacacagctgctgaaatggaggaggtgaatggaaggtttacacagcaactatagagggaagacagcaggatccagagaaaaagtatcagctatgatcaaactgcaaaggagcctacaatactgccttaaatcatgaccgaggaacaaatgatactaagaatctacctgagcaggacatgtgtggggtgacctccactctcagcagttctgttattttaagaagagcaaccaaagaggaggaatttgcaaggactgcctagggaatcccagatatggaaagcaggggtgggagtgtgggctctaagagcctgacccaacaaccctgtgactctacaacactgtggcactgggggaggggtaaagtgaagcaagaaaggtcctatgaccatggaaaaagaaagaaaccaaggaaggtctgacagcactgactggctccacccaagttcatcaggccaagggacaggagctaagggttatgataatgaccctgaagagagctgtccattgagtcagacctgaaaattctgatttacctcctcctttatgaaacccaagacctcagagaccctgaaaaccaaggggtgcccctcaggaaattataggtcccataacaagaactggactatccagagtctgatgagatgcattttctgagggtgaagggctggttggccaggctgtcaagaaaggcgcagtcaagtctttcctaggaaaacagaccacctgccccagtttccataacaatgtaacatttactttcagcatcagaccagctggacagggccagccaatcagctgcaaataaaatttggttggtaactgctctgcctgaaaattctggtctctgtaggttttgtgccactgacttccctgttcttaggaaggggatttattcacaatttcaatacctttaatacctacagctaatggcaaaactgaaagcacaggtgtcttggcctgggaagctagacctcaggcctcaaaggaatggctggtttggtctgaaaaggagataagaactcctttaataaaagaaattcatcataataaaccacttgaatgttacttccccttagattcatcaacataagtcctttaagtaacaaaatgacaactgacacaagccaatcatcctggccaggctgtggctcattttattgcaaaactgccccttcctaaattttggaaaactgccccttcctatattcaaccaggccatcatacagccttttatactagtgttcacacttgagacaaagacaccatactgtggtcagtgacataactaacagggccgagaagtatattctgtattgaacatctcttaccaatgtcatcaagtagctcctgagatggtggtggcagctcatcaatgtgatgctgtgagaaggcttctactagtttttaaaaaagacaaaagggaaaatgtcttaacaccctcctggacctgaactgaatttttctcggctctcacatagacttgactgaggatttctctcaatgatgaaacaaactaaggaggaaggaagcctcttacataatagttccagtagagacctcctaacatgtgaatggcctttactccccacttctaccccaatccctttcctttcctacatcagcccttaccctggtactgcttgatctatgcccctcccttcctaaggatatttggaggaggtaaggtacaaattcttactaagtggctcaatctggaccagggctgctggaggaatacagaggttctggaccagtcaaaatgaacaaaagcacaaagtaggaggcctttaactaaatattatcaggccaggggatttagaggcaaccacactttgggtcttgccccaagtgctcaattataacattgaccaaaatacctcaacataattcacaaaatccctatccccctgagggaaattccaagagttataccaaagacagaagacgttaaaattaaagtaataaaggtaatatgcctcaagactgctaatattctcagaccttgtgatttggaaactgtcttctaagaatctatcctaaggaaaggatcagaggtacagataaaaatttatgtataaagagcaaaaattggaaaatgatataaatcttaaacataagaaaatggttaagcaacatgtagaatggactataactactacatatatttatgaacaatttttaataacaagggaaaagcctcaaaatataacaagggaataaagcagtccagaactgatacacaatatgatctcactatgctaaaacatattattatatatttataaaaatatttaaaagatatgcaaaaaaaaaagtacatgaggttaaaaaagtgtatagtcaccttctttgttaagcttttatttattctccaagtttcctacaatgagtgtgttttacttttataatcatggggaaaacagcatttctgtctgaacctaatgtggcatcaaagattgataagcatcaatttaagcctccttgattataaacttctattttgatattaaacacagggtacctttaggcaggctccttctctgggtggcatggggtggtgatgagtcacatgccttaacaaggctgggggatccagccccaataaatgaagacaatcttttctataaggaagagataaacatggtaactgtcatgtgtgttgagctaaaaaggcatatgcagctcagtcatttccagttgttttgttgattaagtcaaactcactcacatgtcacctcctctgggaagcctcctttttttttttttttttttttttttttgagatggagtcttactctgttgcccaggctggagtgcagtggcacaatctcagctcactgcaaccttcacctcccgggttcatgcaattctcctgcctcagcctcccaagtagctgggattacaggtgtgtaccaccacgcccagccaaatttttttctgtatttttagtagagacggggtttcatcatgttggccaggctggtctcaaactcctgatctcaaatgatccacccacttcagcttcccaaagtggtgggattacaggcataagccactgcatctggcctgggaagccttatccctgactgcctcctcagcactcagtacttaccgctgtgttacatcaggcctgtctttctcactagacagtgagctcctttgaggcagggatcatgtctttcttattcacacttggatgccttgaagagggcctgacatggtgcttggcacttagaatctgcccaattaacggttaaatgaacacataaaattccttgtcatctccctacttcaaagtgagaccttttttgagccaaataccaaaaaagttgacaatcaatttttcataaaggaacttgtacttttcttttctttttttttttttttttggagacagggtctcactctgtcgcccaggctggagtgtagtggtgcaatcacagttcactgcaacctcgacctcctgggctcaggtaatcctcccacctcagcctcccgtgtagctgaaactacaggcacatggcaccatgtcccagctaattttctgtatcttttgtagagatggggtttcgtcatgctgcccaggctggtctcaaactcctgaaatcaagtgatctgcccgcctcggtctcccaaagtgctgggattataggcttgagccactgtgcctggccagaacttgtagttttcctgactagggtacacatatgagaaagggagaggaaaagaaaaaaaaaggaggaagaagtagaagaagaggaggagaagaaggcagtatatgattaagtgtttttcctgcaggttattagttcaggagttcagagaacagtagagatcgatcaaaactctcagggaagtaaccagggaaggctttaaggaggaagcaaaacttaagcctcccataatatagactcaagagaggagtcccaggcaagccaggagaggacccagcttatttcttgctttcttaatgaatttggagaaatcttggcagtttgggtcactgggccctttgggctgactccatgagtttgtaacgtggaattgatatacttacaagaccagtcagtcttgaagggggagtttcagaggaagtaaggagagaatccagtttctttgctctctctcggacacttataaagtcatcagacaaagtttgaataaattcttgactgttccagcaagaggcaaactctgtcttaacctgaaatgtgatactttcaaggcagtctttatactgactggcagctgaagaaacggaccctgttggagaaaagcggaaggttactgtctgaatcctttatattatttctccttttttcctttttccctttgtttttgttttttctgccccaatatgatgtgcagaaatgaatcttttacattattaaaacaaacaaacaaacaaacaaacaaacaaaacatccaaacccacaaacctata[132 bp omitted]ggctaacacggtgaaaccctgtctctactaaaaatacaaaacattagctgggtgcggtggcgggcgcctgtagtcccagctactcgggaggctgaggcaggagaatggcatgaacccgggaggcggagcttgcagtgagccgagattgcgccactgcactccggcctgggcaacagagtgagactctgtctttaaaaaaaaaaaaaaaaaaaattactgaaacaatcattgatctgagacacagctcctcatggtataaaaaataatagtctctaaacttggcctctaaactttaccaaaataaaataaacggtgattttttaaaccacaaatatattggaagtaaggccactaaagagaggatatttgatgctggttgcatatggttgcaggacttaagaactatataaagtttaagcacaaggtactgttttaagttgcaaactctacaaagctcaatgtttttgtactaaattcagtagtgcttagaggagatgtagcatttgcatggctttaccactgcagttctaaccaaaacctcctaacggctgcccaataatcaccaccaccatcaccccgccccctggcctacaatgggattacccagttttggccctaaagaaaaacctttgcactatgacaacacagccaccagctctgataccacggcttggcttcccagagacaatgggctggggctgtaagtccttctccccaaacacttctcttccctgtgattacctgggctgagtggagtgctgacactggtaggtgcatggtttattttgggtgttttgcatgaagcttccttaaaagagctgtctggttcataggagatactagacaggtcttgaatatccgtcaatgatctaaagaattaagagcacacagtaatgatgagaagatgactagaaaaatcaaacaatatattcctgagaggtactttttaagtataatcttaacaaaatttgtatgtggcaataggccagaattagagaatatcttagaacatcttatgtatcttaaagagaatattagagaacatatttaaaagagattgtaactttattaccaaagagacttttttttggcggcagggacagagttttgctcttgtcacccaggatggagtgcaatggcatgatctcggctcactgcaacctccgcctcccgggttcaagtgattctcctgcctcagcctcctgggtagctgggactacaagcgtgtgccaccatgcctggctaattttagtatttttagtagagatgggattttaccatgttggccaggctggtcacgaactcctgatctcaggtgatccgcccacctcagcctcccaaagtgctgggattacaggcatgagccaccacacctggcaccatagagactttctttgctagatactgtaactttaaacatatcagcagctaaaaataaactatttccatagatgaaatattccatatttccaggatatttacgtggaaaacagatttaatctaccttaagcgtaaacttattattattatgattattattatcatcactacatttccttgagtgtaagctgctattagttataaatcatatcaccaatttgataacaactttttggtgaaagaagcagcatactcacattaagtctacacgtaaaaatggaaagatccttacaaacaagaatatactattcccttaaaaccaagactttacacaagcatccctaggcattctctttggtgatcatacatgtctttctctttcagttcctttggtgactcctttgatgtctcttcttgttcatcttcagtactgtgagaaagaaagtaagaaaattacataaatcccctctgtgaacaaagtacactaactacttgctacaaggaaccagttgatcagcccagtgtgagacgcagaggaaagggcactaagctcaggagtagaaagtgtgagttctgtgccaggcacgttggctcacgtctgtaatcccagcactttgggaggc[134 bp omitted]gagacaggaattgcttgaacccaggaggcggaggttgcagtgagctgagatcgcgccattgcactccagcctgggcagcaagaatgagactccatctccaaaaaaaaaaaaaaaaaaaaaaaaaagtgtgagttctggttctggctgtactactagctgcgagttctctgacatgtctgggcctcatttttctctccagagttgaataaatactctctaagggtcagctctgaaatcagttaaagactctatacgactgtgagcaaattcatgagaaaatcaacagagcacaggaactttgctgggaggtaagatattggagcaaaggggcacagccatgaggcctcagcacctgtaagaagcttcctggcatagtgtaccaggagaggccagagaggcttgtaccaaaaaatggccagaatagtgaagacaaacttgacctgtttctactttaaccaatatttaagattcaatgtcagtactcactgaacattaactataaggcagatcccatgctaaatccttccatgttttcacttttttttttttttttttgagatggagtctcactcttgttgcccaggctggagtgcaatggcgcgatctcagctcactgcaaccttcgcctcctgggttcaagtgattctcctgcctcagcctcccaagtagctggcattacaggcatgcgccaccacgcccggctaattttctgtatttttagtagagacggggtttctccatgttggtcaggctgatctcaaactcctgacctcaggtgatctgcctgcctcggcctcccaaagtgctaagattacaggtgtgagccactgtgcctgtccttcacatttttaatccttgcaaaaatcctctgagaccagtgatataaatgaaagatcatggatttggggttgagttgtgactttattaattctgttaccaaaaatgtttgtttctccttctaaataatacaacaggactttttggccctcttgatttacataaatgaccacagaacttgttttaaccaataaaatatgagtgaaagtgatgagtcacttctgggcagaaactttaacagccagtacacaactcaccgtgttccatttttcctgccttagcaatcaaggaagcacaaaaatggggcctccctcagcctaagtctgatagaaggcaatatagcacagaacattcctggccaacccatgagccatggacatgaagcaggagcaaagaagaaacttgttgttttaaaccactaaaatttgggagttgtttactatatatagcataatctagtctatcctgactgactagctgagtgaccttagaaaaaaatatttaaactctctgaactttgctttctttactggcaaatggaggcaatggtatgtgcctcacagggttgttatgtggattaaatcagacaatgaaacagagtgcctggcatatgctagatatttaggaaatactagctacaataattataattaaggaaactgaggcccagagagaataaaataaattgaatgttattgtgccagatacgttataacaattatgaattttttaaacttttcttttgag[146 bp omitted]gaaaccccatctctactaaaaatacaaaattagccaggtgtggtggcacatgcctataattccgctacttgggaggctggggcaggagaatcacttgaacccgggaggtggaggttgcagtgagctgagatcacgccactgcagtgagctgagatcacgccactgcagtgagctgagatcacacaacaagagtgaaattctatctcaagaaaaagaaaatacactttacccactttatcccagtggtaacatcttgcaaatctataggacagtatcacaaccaggatattgacattgatacagtcaagatacagaacatttctactaccacaaagatatttctggtttacagctatgcctgcttccctcctttccccaccccttccttaacccctggcaaccactcatctgttctttatttttataattttgtcatttcaagaatgttatattaatggaatcacacagtaaataactttttgggattgcttttcctactcagcataattctctggaaatttagccaagttgttgcatgtatcaatagtttatttctttttactgctgagtagcaagcactcaatggtatggatgtaccaaagtctgtttaatcatttacttggtgaaggacatccgggtttccagtttggaggtattatggataaatttgttataaacgttcctgtatgtatttctgtgtaaatgtaaattttcatctctctgggataaatgcccaggagttatattattactttaagttcctattgtcaacattctcagtaaggattcttatccctgcttcacagatgggaaaatagaatagaggggttgagaaccttgacaaggtcacatgaacagaaagtcagagtcagatctaagtaaaggtgatgactcaatccctcaaattctactgcacaagtcctaacacagctaagctgcccaaagctaacttttataagatagtagctaatacatctgaagacaagcaatatataaacacggagcattatcaccatttaacattgcatctatgagtttgaaactgcataagataataatagcccataccttcgtacaggttgaaattgagacctgggcaaaatctcagcattctttccaagaatttttctcatttggaacttttcctcacctgaaagaataaagttaaaaatatatatatatatttttttttactgaatctttgtcaacccaaattattgtcaccattccctagaatgtcccttggtctggtccagaattagaaataatctggataaacaaagtgctgccctaattgggtttggattgagtgctgtagaagaggtttttgctctgaaagtttattttccttgctcagagcacagaactatattctgacactcagaatacaatcaagctatttactggcctttcagttataaccacagttatttctgaagacaaatgttgttttgtctttttaagaaggcaaactgacccggttcctgtcaacagacgccagggggcgttgaaaacaagaactgtttgttaactaaacagccccgaactctaactatgccacttggccatcaaacactaggtgtgggcgtgggcgtgggcgtggggtcttgagtactgaggagctaattcaactgtcttctgttcttcttggcatcaagttatctgaagttactcctccccagttctcagtaagatgctttgctccaggcaggcagggccagtatccattttccttcccaccactgtactgtcctagttaataaagaagggggcagatggagcatccagccctgtttccaaatgcctatgactcccccacccccatcccattccttaggtccaggtggtctggtagacactaagaaggcccatcagaacaatgccacctttcacagctaccaaggagctctgaaaccccaccagtggagagacattgggggttcctcttcctctgacccttttaaaatgataaatatccagaaagcataaactaattcctaagaagcaacatttagagcttagagactttagagtccgaccctctcctttactttataccaggggaaagtagggccctggggtgaagtgacttgctgaaggttatgcagaaaaagtcagtggcagaatgggtcttggaacctagcatgctgcatcctgtacccctgttgtgtcctctcatgtggaaggggatatatatcagaacagtagaaggaaaagggggcagagaggggcagaaagaagtgaatggagtagaaatcagagactttttcacatacttcatgtgtctgtattaaactagctctggttatctgacctgtctgccctaaacttttccatcccactcaactcacctccacatacaagttaagtggccacatacaaggcaggtccaaaaaagaggctctgcaggaagaggtgggtggcccaaggctctggagacttttaatacatattatgctgagactttaagtaaaagttgatctaaaagcttacagcttcttaaaatgctcccaactctggcaggggccttcacaaggttacagttggaagctggagtatgcagtggaagaagggagtaagttcataacactacgctgtttgggtttagacggttgagacatgaccatggatagctacacaggttggtaggtggataactctacttttaaaatagatgagtacataccttaaaagaacaagagtacacaattttaaaaatgtaacaaagccaacagttaacttatatctgtctggtgccacatccctggctactgatccaaggctaccttctcatctaaaagaaagcccctgctaagttatatagaacccaaggcctcccaagtggtagatgttaagttgaatctgcattgttaactgttactaactctttgctaagatgctaagcaagcaaaggaaaatgctggtgacactgccttctggggagaagaaatacatgaaaacctagttctaattttgttatgttaataactagctatgtagcttgggcaaatcccccaggtcagcttagcaaagataactgcacttgctatgtggcacaccaaggagcctgaaagcttgagagaccaaagggggaaaaagcagtgactacaacaacatttgctataaaaatgcaaggggaggtataaataatacaacacgtggatgtcatgaggttggtgaggaggaagggatttgttctattgaggagaaatcattgaaccttggttttctcaaccatataatgaaaggtttggacgaggctgtccctcaggatccccccagctctaaacatctgtgatccaacagaagaaatttaagggaagtgattctcaaggaatcttccctaagggcttattaccagagacttgaggttgggcaaatgcaccttgtattccttcaaagtcctcttctatgggactcgaggtctaaaaaagaacaaaagaaaagcaaagaaaggaggttcactggaggcagacatattaaaaggtcaataatttcttgatgttcttaaatcttgaaaatcttcataagatccctgcatctttatagaaaaagcacaaacttgcttcctagacattaagtacttatttgtatcatatgtcctctcctcagtaagtcctccctcacctctcattgtgaagaggaattatgtgactccgcctccttatatcactatccctattcaacccaatcttccaacaaagatattttggttcttgggagctttatcagaagagctaaagaaggcttaaaagctggcccagtctgcaaaactactctacgaggtaagaagtcagaacaatggttccttttggaagaggcagtgactggatgggatcacaaggggtcttttggggactagtaatgtttcatttcctttttttcaaacaaggtcttgctatgttgctcaagctgttctcaaactcctgagctcaagcaatcctcccgcctcagcctcctaaagtgttgtgattatagacatgagccaccacacctagctgaaattatatatatatattttttgagacggagtctcattctgtcgcccaggctggagtgcagtggcacgatctcagctcactgcaccctctgtcccccgggttcaagcaattctcctgcctcagcctcccgagtagctgggaatacaggcacctgccactgcgcccggttaatttttgtatttttagtagagacgaggtttcaccatcttggccaggctggtcttgaacttctgacctcacgatccacccacctcggcctccccaagtgctgggattacaggcgtgagctaccgcgcctggcctgaaattacatctttgatgcatcctagaattcttatcagtcaaatactgtgattgacacaatcctccctttcatataggtaaaagatcccaaaaaggtgccaggttagcagggaggtagggtggaaaataagtaaataagagaattcatcaaaattcattttacaaatgaaaatactctgtacaggaggttcttgtaaaagctaggcagattcccaagaaaacttggtatattggacagtctcatatttgttgctgaacccttgcctcaatcctggctctcccatcactaaaacttggcaggctggagttaattaattccgtatatctgcagaacaccagtcttcctcagagagaggaatgatagccttgtcctttcccattaggaagtatgaattaagtagcatgaataaaaacattttgagccaggcatggtggctcacgcctgtaatcccagcattttgggaggccgaggcgggcggatcacgagttcaggagtttgagaccagcccgaccaacatggtgaaaccccatctctactaaaaatacaaaaattagctgggtgtgatggcacacgcctgtaattccagctactcaggaggctgaggcaggagaatcgcttgaacccgggaggcagaggatgcggtgagccgagatcacaccactgcactccagcctgggtgacagagcgagactctatctcaaaaattaaaaaaaaaaaaaagttttgaaaaaaaagtacaaagtgctgtataaatgcagtaaccacaattttgggagaaactgcacatgacttcccatcctcaaaaataaaaaaattttcagatgtttttcaaaacacgtatgaatgcatgggttcatatcacactcctgacaccaaaaaaggtataaaaaatcctggtagacattacatactttgatatgtaagctatttttctcaataaaagaaataaggcaatggagaaaggtgaaaaggtactttaccctgaactgcgttttttacctctagagctaagttttcttgagcagtcgaggagtaaaaatattcaccgtctggagttaaaaattcatctgttatatcctcagaagactctggtgaacaagttgattgcatggactgatgctattaataatgtaggaaatcacttttaagttgctgttcattgtaacgaaatccctttatagttggatgcagtgttaacaacggggttatctaacactacccagcagtcagtgtgacactgagctgactctccctacctctttgtgcatgtgcctctgccttcccttcctggtggggaaaagcagctgttaactgactggaatagcatgaaggaatgctaatcctgagcctcagcatcatcatctgcagaatgggtggagatgaggtgaccgtcctattctaatattctaaataaggagaaaggccctagtcaactcaagttgaggactgaatttaaacacactaatccctcacaggcagagacatagcccatgtgttggcatcatcttacagatgaggaggctgcggctactcagaacctgtgagtcccttgagtattataggttaaaggcaaatgaagaagcattttaaaaacagcaatgtagtctcaataataaaaataaaatagtaaaaagcagcaaatttatatttacttatttatttttctgagacagagtctctctctgtcactcagactggagtgcagaggtgcgatcttggctcactgcaacctccacctcccaggttcaagtgattctcctgcctcagcctcctgagtagctgggactataggcatgtgccaccatgcccagctaatttttgtatttttagtagagaggggtttcactatggtggccaaactggtcttgaactcctgacttcgtgatctgcctgcctctgcctcccaaagtgctgggattacagacatgagccaccacacccggcctgcaaatttctttttttttttttttgagacagagtcttcctctgtcacccaggctggcgtgcagtggcatgatctcggctcactgcagcctccgcctctggggtcccagtgattctcctgcctcagcttcccaagtagctgggatcacaggtgtgtgccaccacacctgtctactttttgtatttttagtagagatggggtttcaccatgttggcatggctggtctcaaactcctgacctcaagtgatcctcccacctcggcctcccaaagtgctgggattataggtgtgagccaccgcgaccggcctgcaaatttatttctttagcatctctgctccaccccttttttcctgcttatttcacaatattcaggacctgattactatgtggccaaacaaatggctcacttcagtctttttttttttttttttgagacatggtttcattcagtccacccaggctagagtacagtggcgcaatgacagctcactgcagccttgaactgctgggctcaagcgatcctcctgcctcagcctcccgaatagctgagactacaggtgcacactatcatgcctgactaatttttattttttttagacagggtctcactctgtcccccaggctggagtgcagtggcctgatcatggctcactgcagcctcaacctccccagactcaggtgatcctcccacttcagcctcccaagtagctgggactagaggcatgcagcatatccagctaacttttgtatcttttgtagagatggggtcttgccatgttgccaaggctggtctcaaactcctggactcaagcaatctgcccaccttggcctcccaaagggctgggattacaggagtgagccactgcactcagctgatttttacatttttttgtaggcagggtcatactatggtgcccagcctggtcttgaactcctggctttaagcgatcctccagcttcagcctcccaatgtactggaattataggtgtgagccactacacccaaccttcagtgatctcttggcagagattttgtgactaatttcctcggacactgctttttgccacacacttcccttcctgtgcacttaacagctgctcctctttacctctcatcaaactgaattcgtcctggcctccggcagacattccccactttcctgcctaggcctgcttctccagctcagccagtatggttaatatgactgttcttccagccctcaagtccgagaaagaataagttgatcttatgaatggttcatatgccatgattaaatacaataggtcaaaagaccttacattttatcactattgtattcatatattgtatcattctcaattgctgtctatattctttaaatgattgcaatcccatgtcaatgacaataaaaaaattttggtttcttagtctggctgcgctatggcctagagtgtgttaaagccctgaagcaaggctgtaactgcagtggaaacgcatatagatcctgctgaggtgcagttgtcaggcacaaacacatcacttccactgagctgggtgctgagtttggcccttagaggatattccaggtgaagatactctcatagcaaccctgcccttgcttttcctactcctaactgacctcagtcgcctgctggggaaggagctttgccctagttttgtttagcaaactatgccagaaactcatgtgccaaagctgaatctgacacttttctgtactctcccaatctccaggatacacaattcattgagttgaactgactttttaaaaagtatcagacaggaggaaagattattttattcatgtcagtgacatgaaggcacatgctccagccaaaaagaactactatagctattattttggtgtcataacacataacaataactcagttctatcttattagatctttgggttcaacttggctttccaggcagtattacttacactgtaagatttctctacagccaccaatgtgtcagaacttgcttggaaggcttcactatgctctggttgctccttttgtctgggagatgggtgcctgatacctaatgattgtaacacagtcagggtcaaagtcattcagtgatattcagacaacatggaagaggataaaggtggcatgaaagaagagatgtatacatattctgccaagagtggccatgtcccatacgttaggttcagtccagagagtagagactgttagtttagcctgaccccaaaatgcagccctggatcatctgcccacccattcgagagtgatgcttgacaagaaacagattctaaatacaaataatacccaagccaatagattttctgcctaagacaaatgacaagtttagatgtatctttctttaacttataaacaactgtgaaacaatatccatgccctgattataagcaaattatcaactgaaaatatacagccttcattttttttaacctgtaaatctataaaccgatgacaataaatgtcatgtgtctctaggttcctccagcatagactctctggaaaaatttaatgccagcttagaatacattctaaataaattctgggagaatttaatttcagcttagaatacaatgcagagacatgggcagtaggcagtgatggcctacctctatccccaggtaaagaaggatcgattcctcgccaaaaccagggtcagtatttgattattttacttcctttggacaaagggacctgtttcagtaatataaaaactgatcagtgtctggatctgtttgcctgtgggaaatgcaatgagatatagggctatactgtcttcccctggaattcaaggtttccagaaaagtaggaaaggagagaggaccaaaccaaaaaaaatatgctggaaagtttacttttttgagagctgataacttttttttacttttatttttattttgagacagggtctcactgtcacccaagctggagtgcagtttcatgatcacagctcactgcaacctccacctctcaggtccaagtgatcctcccacctcagcctcctgggtacctggaactagaggcgtgtgccaccacgcccagctaatgttttttttttttttttttttttttttgtagagaccaggtttcatcatgttgaccaggctggtcccaaattcctgggctcaggtgatccgctcgcctcacctcccaaagtgctggaattacaggctgagccacctcgcccgactgatacttgattgagttcacctatcctgattcccgcaagtgaacttactggtgaagcttccaagcctgggctgtctgccatgctggtcactgtcacagtcattgttgcccgtcttgtcaaacttgccatttcctctgggctcatcattttccctatgatactcaataactcgctgccaatccgtgttttctgggctcctaatggggggctgcagcagggcgtcgggctcattttcagcctcgctctctaaagtcagactactctgaggatgccaaggaggtactgtgagctgtccagtagctgctttctttgccatttctttcacctccactgtgcataagagaaagcagcatttaaaacatcactgtaaacactggaaacacaggctttcatctaaaagaaatacataatactattataactcatagtgtaacaattgcctttttacagttgcatcatccttagcttgccctgtttggcttgaatgggaggtcaggggagaattgatgacagagagagagaagggaatttcagtcagttatcccaaacaacagcccttgttgcttacttccagggtgaaaggcagcaaacaacttacagatagaccctcttcctgtgaagttttaacaggaaaaatgacatctatagttcttagtgtgtaataatagaaagtattctatttgagtttgtctagtctttccagactacactgagctcatatttttggaatgcatacatatatgcatgttttcatttcaaatgttgtcaaacacttctgctaatgtcacttacgactagtattaaaaatagacattatatcctttaagcctgtaagagaaaactgatacaaagaataatgcccacaggatatgagagtgacactgcatactctccacttttataatgttatatagtaaatatctatgtagcagttcctcaaataatgtcattttattcaacattgtttcattgtaactctgatgagaaaaaaaaaaaacaatcaattcccagctggggccactgtctgtgtggcacttgcatgttctccccgcatctgcatgggttttttccaggtagtccggtttcctcccacatcctaaatatgtgcacgttaggtgaactagtgtgttgaagttgccccagtctgtgtgagtgggagtgtgtgagtacactctgcaatggaatggtgtctgtctagggctggttccctccttgtaccctgagttgccaggataggttccagccacctgtgaccctgaactagaataaacaggtaattacttatcttacttgtttttattaatctctcttaaatgtgtacatagctcacatttatttcaatgtttaatattagaagtgtcttggtctttatttagaagtatggtgatgtatttgtgaccagaaatatgctataggaacttaactcttgcttacatcaattagcccatggtaaaattggttttgttatacatcgttttgcttaaagtcgtagtttgcttaaagtcattgtcatttcctattaacagaataaggtgaggacttattgtattgtgcactgttttgttacatttcttatacaatatacatttatatattagaaatatttcctataaagtctagaaattaaaaaaaaagcatttcccttctgaagtctgtagtcagaagggccctgcttttaaaatgaaatataataaaagaaaaaaattcagaaggacattgctatggttctaaatgtgcaacacaggttgtgtacttagaaatatcaaccacattagaaatatactttaaatttcattttgtctaataaaacccatgactttatactcacttttccattttaagtgtacctttccatcatctttatttctggactctgcattatagatttcagaagaaacaggttccacactcatcctgaattgcacgggttttttggaggtagggggagcggggtggacacaaacacatcagtttgctcaagttcttgacagaaccaaaagcccaccagcccatccagaggacctgttccctactccctaagccattcctagagttgcactgacccctttgcaccagcagagggtgccagaacccacccccacccccgctccaccaccagtttccagcccacaaggatccttacctggtagagtcccagtgacagctgggtgatgcagaaggtccctgccggtggcttgacagagtgaagagtgcactattaaactgtgtggctttggcttgggcagtggactctctaggtcttccctggctaagaaatgaaaggactgagctataagatctctaagagtatttttagtttctaagtttagatttcatgattataaaagtgctcttgggagattttcagaggtagaagaaacccgcagttgaagcgcagtttcacaagacacaatccctgggctgttgcagagcctcccctgcaaatgccacaaatcacaggtgatggttcaggtgagggttctgctcctgcccgtccatcagaattctctggtaacaggcccaccttcatatcagtgacagcacaataacatttgtagttgttgagacagagtctcagtctgtcacccaggagtgcagtggtacgacctcagctcactgcaacctccgcctcctgggttcaagcaattctcatgcctcagcttcccaagtagctgggattacacatgcacgccaccatgcccggctagtttttgtatttttagtagaaaattatgttgcccaagctggtcttgaactccttatctcgagtgatccacccacctcggcctcccaaagtgctaggattacaggtgtgagccaccatgcccggcctaacgtttgtaaaaacagtcttaaggcatcagagatcctgaagaacattcagagaccttcaatctagtcccactgaattctagaccctgacctaccactaggttactatctgactttggcaaacatcaatctctctaggccaaggcttcctcatttgcaacataaaggcgtctttttttcctctaaatatcccataactagccaggatggtggctcaggtctgtagtctcagctacttgggaggctaaggcaggaggattacttgagctcaggaggtcaaggccagcttgtacaacatagtgaaactctgtctccagaaaaaaaataaacaaataaagtttataaatatctcatgaacatgtacattttatcatctattcaattaacttttcaaaaacgcatgaactggctgggcacggtagctcacacctgtaatcccagcactttgggaggccagggcaggcggaggccaggagttgaggtgagcctggccaacatggtgaaaactctatactaaaaaaacaaaaaattagctgggcatggtggtgcatgcctgtaataccaactactcaggtggctgaggcatgagaattgcttgaacccgggaggcggaggttgcagtgagctgagatcacaccactgcactccagcctgggtgacagagcgagactctatttccaaagaaaaaaaagtgtaggctgggtgcagtggttcatgcctgtaatcccagcactttgggagaccggggcaggtgaatcatgaggtcaggagttcaagaccagcctggccaacatggtgaaaccccgtatctcctaaaaatacaaaaaattagctgggcatggtggcgggcgcctgtaatcccagctacttgggaggctgaggcaggagaatctcttgaacccgggaggcagaggttgcagtgagccaagatccactgcgctccagcttgggcaacagtgcgagactccgtctcaaaaaaaaaaaaaaaaaaaagtgtgtgctctgtggcacagatatgaattccctgttatctagaatgccctactctccagctggaccagaaagcagagagactgctgaatcagagagggtagatctgatcagcttcctttttaaaaaaataaaattcttttggagatagggtctgactctgtcactaggctggagtacagtggcacaatcacagattactgcaggctcaacttcccaggctccagcgatcctcccacctcagcctcccaagtagctgggaccacaggcacctgccaccacagccagctagtttttgtatttttggtagggatgaagtcacacaatgtttgttgcccagcgtggtctcaaactcccagacttcaa[138 bp omitted]ggtgaaatcttgtctctactaaaaatacaaaaattagccgggtgtggtggtgcacgcctgtaatcccagctactcaggagtctgagacaggagaatcgcttgaacccaggaggcggaggttgcagtgagccgagtttgcgccactgcactccagcctggcgacatagcaagactctgtgtcaaaaaaaaaaaaaaaaaaaaaccatgaactgagattgcgccactgcaaggaagcctgggcgacagagcgagaccctgtcttaaaaaggaggggaaaagaatccttaaaatcttcaaaccctttgaccaagtaattctgcttctgagaatccatcctgaggaaataatccaaaatgcaaaaacaaagcattatttacaagtaactgtgtccctattcataacagaataaagaatgaagcaacctaaaattcaacaataggtgaaatccaactatttttgttgttgttgttgttgttgttgttgttgttgttgtttgagacagggtcttattctgtcgcccaaactggaatgcagtggcataatcatggcactgcagccttgacctccccaggatcaggtgatcctcccacctcagcctcccaagtaggagagggtgtgggtctacagccgcacaccaccatgcctggctaattttttgtagagatggtgttttgccatgtttcccagggtagtctccaattcctgggctcaagtgatctgcctgtcttggcttccgaaagtgctgggattacaggtgggagccaccttgcccagcccaacaatttcaaaataagtttacagggttttttttttttaataacatagagtaatgtttacattctaatgtaaagtgaaaatcatgacataaaattgcttacacatatcgtaattgtcactttttttttaagcacacaaaaagactagaggaacaggtggaaaaatgtcaaacttttttttggtctgttctttgtacttctgagggaagagggtgccgagcaggggaggccacaacaactatgggtttttctttgtcatctaatggctatgtcatcccatttgcttctatcagtggtgtgagtgccaaacactctgatgccagctaggtagttcttcattattcccttcataggaataaaatccactgatctaaaatgtctggctgggcgcggtggctcacgcctgtaatcccaacactttgggaggccaaggtgggtggatcacctgaggtcaggagtttgagaccagcctgaccaacatggagaaactccatctctactaaaaaatacaaaattaaccaggcctggtggtgcatgtctgtaatcccagctacttgggaggatgaggcaggagaatcgcttgaacctgggaggtggaggttgcagtgagccaatatcgcgccattgcactccagcctggggaacaagggcgaaactccatttcaaaaatataaaaaataaataaataaaatgtctggacattttccttcattttcccttacatacatatttgccaacatgaaacaaacagcaaactcgtcattagtctcaatcaccactagggcgaggaataaaaagtttttttttccaggagaactgacttcaaagttgtggattagtgctaccatttatccacaggaaaaaaaaaaaacaaaaaaaaactaaaactgatatactagtctgtcgtgaaaaacatatattggctgggagtggtgacttacacctataatcccagtactttgggaggctgaggtgggtggatgacctgaggtcaggagttcaagaccagcctggccaacatggtgaaaccccatctctactaaaaatataaaaaattagctgggcatggtggtgggcacctgtaatcccagctactcaggaggctgagacaggaggatcgcttgaacccaggaggtggagtttgcagtgagtcgagatcacgccactgcactctatctagcctgggcaacaagagtgaaactccatctcaaaaaaaaaaaagaaagaaaaaaaaattattgcccttttagtaattcccttacttataatacctaactaaatttaaaccaaaaaaaattttaatcaattttttaaaaattgaaaaaaaattcccacacaccaaataaatttgttttacttaagttcgttctttatttatttaatttttttttttgagtcagaatctcactctgttgccaaggctggagtgcagtggtgccatctcagctcactgcaacttctgcctcctgggttcgagtgattctttttttttttttttgagacggagtcttgctctatcgcccaggctggactgcagtggcgcgatctcctctcactgcaagctctgcttcctgggttcacgccattttcctgcctcagcctcccgagtagctgggactataggcgcccgccac[137 bp omitted]acccagctgttcaagctattattgagcttccacctcccaagtagctgggattacaggtgcccgccaccacgcccggctaatttatgtatttttagtagagacggggtttcaccatgttggccaggctgctctcgaactcctgacctcaagtgatccgcccaccttggcctcccaaagtgctaggattacaggcgtgacccaccacactcggcctgttttacttaagttctttaaaactcagcatgtgtgtgtgtatgtatgaatatatgtatgtatgtatacacatgcacgaatatatgtgtatatgcatatatatgcatgaatacatatatacctatgtgtgcatgaatacatatacatatatgtatgaatatattatatatacgtatatgtgtatgaatatattatatatacatatatgtgtatgaacatatatacaaacacacacacactcttcttccagtaatttgtgctaaagtcaattcatttcattcgtctggctggaaatcacacaccccagggtcatagtgatgttgttcaactctctctggagtcagtgacacttactttaaacaaccctggtttccaattagtttagtttctggagcactggtaaatggaatacctggtgtttgtttttataagaaaaactatctgggcagttgcggaaaggcaagatgctttgcttctaacaactgatgagttctgtctgattaacctgccagccacttgggctttgatgtctcctcaagttcccatgacactgctcttcctactcactcagtgggagaacctgccaatctgcattactcttcttcatcactcacagtccttttgtcactagacataagaagatcactgagtggcctcagagacacacagaagtctaaaggcatagtgacattaagaacaacaaaatgttgacccacctactggtattttggatcctgcttgtttccaaactgtccttggctccttgagtgcactgaaattgttcatctgtgttctgttttccagggtcacaaagagtcggcagcttaaaaagcaataaacatgtttcagggctttgatgagagaattcccactctcttcactgtcacactattttcaaagccattcttgctaaatgtatagaaataaccagacctaccaggattttcctttgcatgtttcctatctgctaacccatctcttatctggaggtctttttttgttttgcttttattttgagacggagtctggctctgtcaccaggctggagtgcagtggcaagatcctggctcactgcaacctccgcctctcaggttcaagagattctcctgcctcagtctcccgagtagctgggactacaggcgcacaccaccacacccagctaatttttgtattgttagtagagacagggttt[141 bp omitted]acctagcccagacaggatacaagtggagaataagcagacaagatagaaataaaaaaaaaatccactttcctgagcattttccccctcctatatgaatatgaagacagcagatctttgtggcaggagtaaaggcccttgggttctagtctaagtgttattcagactaacataagagaatctttttcttttttttttttttgagatggcctcactctgttgcccagactggagtgcagtagcctggtctcggctcactgcaacctctgattcccaggctcaagagattctcatgactcagcctcctgagtagctgggattacaggtgcgcgccactaccactcagctaattttttatatttctagtagagacgtggtttcaccatgttggccaggctggtcacgaacccctgacctcaaatgatccaccctccttgacctcccaaagtacagggattacaggcgtgagacaccgcaccctgacactaagagaatcttgtacttatccataaagtaagaccttgtacttatccataaaataagaatgataatacctaccactggggatgctatgaaaataaaacagaatacaataaaggttacaatacttaggaaacagcaaaagtaaaacaaatgaaagtctgtgctctttattcaagagactattagctctacttatcccaattttaacataattttaacaaacttagttaattatatttcctagcctacagcaaattaaggcaacaaatatggagtttgagatgggagcaagatgtgtaaaagtgagaaggaggcacaaaaaattactacatgctccctgaagtataagatccagaggcctttgtatgggcaaacactccttagcagaagcttaagacagccctatatcatgatgcttcaccataacaggtgttcagaaaaataccactgtcaccaagaaaaggttagaatatgtttagaatataatcaaaatagatatttagaatatcatgaagtttgtaacgttttcattcaatataattaaaattttaagaactaagaaattaaagaaataaacttcaattgtctgaaaaatgcatttagatggagatggctttttccctgatgctagaaaaagagggtgatgtttttaaggaaaaaataaatatggtatcattgttttatatcctatgtactagtagattgtttccagcagtggccgccatcaattccctcctgtccaccctgccacgcctcctataaggagctagagtctatttccccacccagtgaatctgggctggcctcgtgaatttcttcgatcaacagaaagcagcgaaagtgatacaatcctagggtcaggactaacttttaagaggtctggtggttttagctttcacttgcaaagtcagctgctatgctgtagagaagcttgggtgagactatttattgaatgacaagtcaagtgcaaagagaggccacctggaggagctcaaggtaccagacatgtaagtagaggcttcttggaccttcttgcccagtccaacctccagctgactgcaaacaactgagtgatgctagccaatggccatgtggaacagaagatccactcaggtgaacctgtcaaattcctgacccacagaattgtgagaaataataaactattgttattttaagccattaggttttgggctttgttgttgttgctacgcagcaatagataacaaaatataatatataaaagttatttcaggccgggcgcggtcgctcacacctgtaatcccaacactttgggaggccaaggtgggcggatcacaaggtcaggagtttgagaccagcctggccaatatggtaaaaccccctctctactaaaaatacaaaaattagccgggcatggtggtgcgcacctgtagtcccagctactcgggaggctgaggcagaagaatcgcttgaacccgggaggtggaagttgcagtgagctgagatggtgccactgcactccaccctgggtgacagagcaagattctgtctttaaaaatttaaaaaaaaaaaagtgatttctaacagttttctagcaaactctaattttctatggaaacagaaatattaggatataagtaaattctttgtgccttttttgtttgtttttgagacagggtctcactctgttgcctgtgctagagtgctgtcacatgatttcagctcactgtaatctcaacttcctgagctcaggtgatcctcccacttcagcctcccaagtagctgggactacaggcacacgccaccatgcccagctaattttgatatcttttgtagaaacagggtttcgttatgttgcccaggctggtcttgaactcctgggctcaagcgattaacctgccttggcctcccaaagtgctggaataaaccactgcacctggctgtgtcttctctttatataaaaacaaatgacagctgggcatggtggctcttgcctgtaatcccacacttttggaggccaaggcgggtggattgcttgagctcaagagtttgagagcagcctgggcaacatagtgaaaccccatctctatggaaaaaaaaaaaaagataaagaaataaataccagccgggcgtgctgagaccccatctctacaattcacaaaattagccaggtgtgctgatacagcctgtagtcccacctactcaggggtctgaggcgggaggatcgcttgagtccagaagattgaggctgcagtgagccatgacagtgccacttcactccagcaaaaataaatgccaatgcttttccaaatgttctaagtgaggactgaagcctcactaagattcagtattgtacaatgaaagaacaacagaccaggagtcaggagacctgcccctaaccaacttggcccttggttgtagcacagcaagttgagaggtggcagggagagctatcttccctgtataggcaataaaagggtgatatggccaggcacggtggctcatgcctgtaatcctagcactttgggaggctgaggcaggtggatcacctatggtcaggagttcaagaccagctgggccaacatggtgaaaacctgtctctactaaaaatacaaaaaattagccaggcatggtggcacgtgactgtagtcccagctactcgggaggctgaggcaggagaatcgcttgaacctgggaggcagagtttgcagtgagcagagatcgtgccactgtactccggcctgggcaacagagtgagaccctatctcaaaataaataaaataaaataaaaaataaaaaagaggataactcttaagcggagaattctaaaacagtaacaaaacccagtaaaagttggcctgctttttatcaccatgggccagctattctaaataatatcagtaataacatccgccttccaatgaggcagacctctcccaccccacccgcatcttgacatctctgggcctcaggaagtttatatcactgggcttgagcttcacactctgtaaattgacagggctaatccatgtctaagggatcttccaactctaaaattataaaattcaagaggcagccagctctctgagtgtgaacttgttcaaattcattaattcattcatcccctcattccttcactgactatttactgagttccttctatgtactggtcaccatgctaggtgctgggacacaggaggagtcagatgttggccctgtccttaaggaaactcacggaggagcctctctgcaagctatacctcctagccagctcccatggtgtctgctcacctcctctgaggggttttctttgatccaccaggtccctcagtccccagctgttatctgagctacttatgggcagagtttgtggcttattcatcatcagaacccagagtctaggccaggcaaggtggctcatgcctgtaatcccaacactttgggaggccgaggtgggcagatcacctgaggtcaggagttcgagaccagcggtgaccaacatgaagaaaccccatctctattaaaaatacaaaattagccaggcatggtggcgcatgactgtaatcccacctgctagggaggctgaggcaggagaatcacttgaaccccacaggtggaggttgtggtgagccaagatcacgccactgcactccagcctgggcaacaggaacaaaactctgtctccaaaaaaaaaaaaaaaagaaaaaacccagagtctagatagcctctggctctatagctgtttgttgaatgagtgaatgaatgaatagcagcttagaatggagattaatacctatccaagatactttattcaataagttgagccatgcaaaattgccaatacttgaccattttaactaataaaacagaaatttaatatggttcaatttgatacatacgaatttacagagaaggacaatgggctgtgtgttgggtctgaactgggagacagagagtatctacgttggaattccaccatggaggactgatttcccaaagctaagagcaccttgctatgagtcagttgcatatatatgtcagtccctccacataggttaggggcaacgtcaaacccagccctggggtcctgcttaggatgccccttcctcccactcaggttacctgatggcttatctctgactgatccccagtgtttactttggagacttgggtgaaaggtttccagccacaaccatttcttttcctggatcttttgccaaaatgtcccccttgaaagtctcttaccattcttggaaatcttggtagggttgggtagttgccactggtgtctggcttctgaccccctgaaagctgtaggacaggaggaatatagtttaaagatggagggcccacggccagaggtaacttgtaggcatttgtaaactctcttgaagtggcccataaagacatgcgctcttcctgttccttctgtttcatctcgacttcatctaatatctgctcgatattcctcagcctatcatcattctcgtgcattattgtctgcataatctttagatccagcacacacttactgatgagatactcctcagtcgtggacatgttgttcaaattgctcttggcttctctggttgactcaggaaggctgagtgaactgagtgaaccgttttgccagtcccagtcatcaaaagagtactctgtctcagcttttgaagagctctcatcctcactgccaaaacaacacgcctctctctccatcttatccagctcttcttccatggatttcagttcatctacctggttaggtccgtctgcctccaaagatgaagcagctcctggaggctcttctatgtcatcttccaaaatcaagcagcctgagtagatctcgttgatttcgaaactgcagaggcttggctgacctgtgctggggctgctggcctcttctgccataaatggagcagggcaaggagcatcttgattctgagtctccctggccatcagacatggatctggggcctgaggatctagtgtcccctcagtgaataaagagtgaacccttggtgaatgaggttgactgcctattgaaaaaaacagcaaaatgcaactcattaaaatgaacatatttggcagctaagcagccttggcttgttcaagaggcaaagactgtcaaaaaaaaaaaaaaagttttttattttcccacccccttcccagttgtggaagactactggatacactcacaaagggtgagggagtatgtgtcccctaggggaaagctcctattttgacatggaatgaggcagaaattgttgtcagggcaggggtctagccatggaggaaatattctaagctttattgtgtgtccaaacatgcataactgtcaggacatgcaaattagaggcccctgaatcttgttttcttttgttttatagagatggggtcttgctgtgttgcccaggttgctctcaaactcctggctttaagtgatcctcccgtctcactctcccaaagtgctgggattacaggtgtgagccaccgtgcccagctcccctgaatcttaaggaccacgttcatagccttcttttcacacaaaagagtttgactatttctcagttaaagttatgctcttggtgagcatctgataacagtagcctagggccaggcgtggtggttcacgcctgtaatcccaacactttgggaggccagggcgggtggatcacttgaggtcaggagttcgagtggtctcaaaccaacatggtgaccaacatggtgaccaccatggcctgaccaacatggtgaaaccccatctctactaaatacaaaaaattagccaggcatggtggtgcatgcctgtagtctcagctacttgggaggctgaggcaggagaatcgcttgaacctgggagacagaggttgcagtaaaccgagattgcgccattgcactccagtctgggcaaaaagagtgaaactgtctcaaaaaaaaaaaaaaagtagcctagataccacccaaggagccattacattatgggagtaatgaaaaaactaaaaaatttatgctaggattgaccacccaccacccctggtttacaggtgtacagcttacagagaatgggactaagctgtcaaagtaatgaggttacagggccactctggaggcctccagcactgctgaaggagagtcagagtgaatggtcatttggctggaattggaaggcctgggttccagttctataacaagttctctgtgatcctgagcaggttacaacctctctgaaccttagttttctcatctgtaatatgaaggcattaagcctgatgactgcaaggtcctttccagttctaaattctaaggttttcaaatgtactaaaatgtagtaaaattggttgggcaaagtggcttatacctgtaatccaagtgctttgggaggcgaaagtgggaggactgcttgaggccaggagttcaagaccaacctgagcaacataatgagacctcatctctaaaaaaaaaaaacttttttaggccaggtgtggtggctcatgcctgcaatcccagcactttgggaggaccaggtgggaggattgcttgagttcaggagttcaagaccagcctgggcaacatcgtgagaccttgtctctactaaaaatttaaaaagtaaggctgggcgcagtggctcacacctgtaatcccagcactttgggaggc[135 bp omitted]gaggcaggagaattgcttgaacccgggaggcggaggttgcaatgagccgagaccccaccattgcactccagcctgggcaacagagcaagattccatctcaaaaaaaaaaaaaaagaaaaaaattagcccagcatggtggcacatgcctgtaatcccagctactcaggaggctgaggcatgagaatcacttgaacccaggaagtggaggttgcagtgagctgagagcatgccactgtactccagtctgggcaatagagctagactttatctcacaaaacaaacaagttacatctacagtttagaggagtcaattagttgcagctcatgtgactctcagaacacatttgtgtcaaactaacacaacctgtgaattaaggccatacccatttcctttagttctatgatttccatgtcaggtgtctctctggggtgttctgaagtcagtcctagatagacattgacatcgggatggagtccgtatctctgcactctggggctctcggttggttgagttctctgggctccagtaaaatcctgtaacacaggaaatattgtcaaggacatagtctcagtcatcctgaatgtcactggtgctttagaaaccatctaagtatctgataaactccctcttattcctgttgggtagactgactttagtcctaattaactagtttattgttattgccaataccttaaaagcaataataatagctaccattcactgaatctccactaagtgcctacagggtgcccctactatgcatatgtgttgaacctccctagctcccctcctcaattccatgctgctttcaccaagttaagcagttaggctattatcaagaacacagaaatggtgtaataaaatgaggatttccaaaatttcttacaacttggtctctagcttcatcttgtctctaactccctattctcctgagttaggtaagcagaaataaactcccaacaacttcagggcttgcctttaagtcattcttcagaatataccggatatcttgaaggttcatagttcggtctttctgcttgacgtggatgcctgacttaacaatatcatagtaaggtttcggaagcctgacatcagcttctaaataattccccgagactacggcttttttaacaactgagccatctaagcccttccagggtatgtcatctgtaaggaaaaagtcatacaaaagagtaaattaggaaaccaaagagtggagtggggggaaaagaaatcagatgaagctgggtaaccttaggcaagtcacttaacttctttatttttttttctaatccactgtactttagaaacaattcatttccttatatattaa[143 bp omitted]tactaaaaatacaaaaattagccaggcgtggtggcgcacacctgcaatcccagccactcaggaggctaaggcaggagaatcgcttgaacccgggaggcagaggttgtagtgagctgagattgcgccactgcactccagcctagcaacaaaaacagaaaacaaaaaaacaaaaaaaaactacctggaaggccaattcataagtgagaagccactttactcatttaccagagagatcaccgccacagagataggaaacaatagtgtcagcaacatgtacacatgggctccccgctggcaggggagcccaatattcatctcatgtatattgtcattttgcctctgggactgcaaacaccataaaaaagcagcccttggccgggcgtggtggctcacgcctgtaatcctagcactttgggaggccgaggtgggtggatcacctgaggtcagaggttgaaaccagcctggccaacacagtgaaatcccatccctactaaaaatacaaaaattagctgggtgtggtggcgagcacatgtaatctcagctactctgggaggccgaggcaggagaatcacttgaacccaggaggtggaggttgcagtgagctgagatcgcgccactgcactccagcctgggcaacagagtaagactccatcttaaaaaaaaaaaaaaaaaaagccttgcacgttggctcacgcctgtaatcccagcactttaggaggctgaggtgggcggatcacgaggtcaggagatccagaccatcctggctaatacggtgaaaccccgtctgtactaaaaatagaaaaaattagccgggcatggtggcacgcgcctgtagtcccagttacttgggaggctgaggcaggagaatcgcttgaacccgggaggcagaagttgcagtgagccaagatcccgccactgcacttcagcctgggcaacagagtgagactctgtcaaaaaaaaaaaaaagcagcccttaatgtgattttactgtgtgtgtgtgtgtgtgtgtgtgtgtgtgtgtgtgtgtgtgtgtgtgtgtgtgtgtgtctttcttttgaaggattccttccatcttcagatatgtgactactttctccacatcagagcagtggatttggaagtacatccatttctttcaagtgacactgtttatacatctaatggacacagggtgtgtttcatagtttacttctcagaggctagtctttccccctaatttacaagttctcaagggataccacacatagatcataagtactgataccaatattcaggttaaaaagtttgcttcggccgggcgtggtggctcacacctgtaatctcagcacttcaggaggccgaggtgggtagatcacaaggtcaagcgatcgagaccagcctggccaatatggtaaaaccccgtctctactaaaaatgcaaaaatcagttgggcgtggtggtgtgcacctgtagtcccagctactcgggaggctgaggcagaagaatcgcttggacccgggaggcagaggttgcagtaaaccgagatcgagccactgcactccagcctgggtgtcagagcaagactctgtctcaaaaaaaataaaaaataaaaataaaaataaatttttttagtgtggattaaatgcatcatcactgacaagcagatggatgggctttgctgagtcttttttttttcttttgagacagagtctcactctgtcacccaggctggagtgcagtggcgctatctcagctcactgcaacctctgcctcccaggttcaagtgattttcctgcctcagcctcccaagtagctgggactacaggcacgtgccaccacgcccagctaatttttgtatttttagtagagacagggtttcaccatt[136 bp omitted]gtcagtaactcctgtggggggagaaaaatgcaacctaagaatagggactttggtcaaccattaatgatcttgatctacctgttaaaatctcctgcatgatcatagaaaagctgtagatgtctgatttcactgtggctgccttctgtaagatcacttctggtgcggcccagttgtatagctgcgtaggaaggggcactcgagtcaggtccctctgtacacctctgtcctcgctacggaaggaaactcacaagtcagcgctcatgccttaaagggtcttttattcattcattcattcattcattctttcattcattcagagtcttgccctgtcacccaggctggaaagcagcagcgtgatctcagctcactgcaacctctgccacctcccgggttcaagcgattctcctgcctcagcctcccaagtagctaggattacaggtgtgtgtcaccaggcccggctaatttttgtattttagtagagacgaggttttgccatgttggccaggctcgtgggtcttttaatcaacatactacatttgtgaaaactttgcctctgaaggctgacaacctctttgagttcctggaaacctagctagacaatgagctagtccacactgcttcagagctgttccaatacctgcaattccttactattccacccgggccctctccaccacttcatctggcaactctactgctcacccactccactcaagtcacagggaccttctttcagttcctccaacatacctcatgttcttcaagtctttgcactggcagcttctgccaggcatgctctgcccacagatcctagaatgactagctactttttgtgactgagatatttgtctgaaagtcacttcctcaaggaggccctccctgactgcctaatctaaagtagtcctgttttattggtttcagagcacttattatctgaatttgtgttcatttagtttatctgtctcccctccattctagagagtcagctccatgagagtaggcaactcatctgcttttatatcactgtacttctgggcttacaccagggccttgatgcttgctgttgaataaatgaacgtaaactctttcaagagccctctcaacccccatctgctttatcaaagccatctgggacttccccaactcctcatgattatttcttttctgaactcctgcccttttgggaatgtgtcctctcagtttagcactcaagggttcactcatatgcttaaataactcttcccaaccagactccttaagagctaagtcagagcatcctaaatgtcttctggcccagcaagagtcctcagggtaaactcagcactgacttgtgcccacagctgtcatgacagtcaaatgagatcatggatgtagaaacactcggtgagccataaagcgctctttcatgtaaagaattagtatgaatattatgggaggcattcagtcaagacttaatgactggcagttgataattaagaattaagtttttaaaaagcaagtgacagcaagttttttgttggtctggaaaaaggatagattttagacgatgagatgggcttctcagactttgagcaaacttccctaaataaagtttcttccagcaaatctttggatagagggcagtgagttcatgaagtcatgaaggtgaaaaagctagtattgactttagttatattgctgaaaagtcacctatggcctagtatagtgtgaacagtgtggatatgcatacaaatttaatacataattatatattgaacccaggaggcagaggttgcagtgcgccaagactgagccactgcactccagcctgggtaacagagtgagactccatcttaaaaaaaaaaagggccaggagcagtggctcatgcctgtaatcccagcactttaggaggccgaggcgggtggatcacttgaggtcaggaattcaagaccagcctggccaacatggtgaaaccccatctctactaaaaacacaaaaattagctgggcatggtggcacgtgcctgtaatgccagctactcaggaggctgaggcagaattgcttgaatccgggagg[131 bp omitted]atggaatgctatccttgacaatgacattcaacaaactgatatgccctagtagagtgttaccaaaaataaatgtgggattgaaggctactttgggttggtgaataatcaactcatgttaccagctttcaaagaagggtatgttgttacacctgcaacggcttgctgtctaacatttctgacacttctacctgaggttccatcctgaggtcattcctagacattcacagacccttggttacctcctaccccctcacttggccagttgttgaccccagcaactccatgcatttcactttattccctcccattttggcttcatggtcaccactaggccctgtctcatggtctcatggctggtgttcctgtcaacctccaatccatcctgcccctgtatcctggagacatcctctactatctgtttagccccatctgtgtctctaaccaatcaattgggtaacttcacaccattgcttcacccctgggtgcctcagtttcctcaactatataaggacagcattgggctgggccatctccaaagctccatttcgggctaggattcacatttctattggtgagcaaaaggagaagaaactgtggtacctttctctcaatagcagatggcgatccatcactgacaaaagtgcacaccctttagcgtccactgctcctgaacacatagccagagaggtcaaccctgctctgaaccattttaagtttttccttcaactagatcatccaatcatttaagaaacatttaccggccagccgtagtggctcatgcctgtaatcccagtactttgggaggccaaggcaggaggactgcctgagcccaggagattgagattgtagtgagccactgtactatggcctgggcaaaagagagagatcctgtgtcccccacccacagaaaagaaggctgggtgtggtggctcacacttgtaatccaagcactttgggaggccaggtcgggcagatcgcatgagtccaggagttcaagtccagcctgggcaacatggcgtgaccttatctctataaaaaatacaaaaattggctgggcgcaggggctcacgcctgtattcccagcactttgggaggctgaggcgggtggatcacaaggtcaggagttcaagaccatcctggccaacatggtgaaaccccatctctactaaaaatacaaaaaattagccgggtatggtggcgggtgcctgtagtcctggctacttgggaggctgaggcaggagaatggcgagaacccaggaggcggagcttgtagtgagccgagatcgtgccactgcactccagcctgggcaacagagcgagactccatctcaaaaaaaaaaaaaaaattagctggatgtggtggcatgtgcctgtagtcccagctactcaggaagctgaggtaggaagatcgcttgacgctgggaggttgcagtgagccgagatcgtgccactgcactccagcctgggcgacagagcaagatcttgtctcaaaaaaataaaaaatatttactgagcacttaccataagtggcaggcccagagctggtgatgaactccccatctggtggcacagacacacttgtataaaaatgactgtggtacatttgcgtgacgcatgtgagaagaggaatatgcaaagtgcctcagggtatgagagcatcagtatagacttcacagagagtgttgggagactgtgtctgaagtgactttaaaaggctaaattggcgtgtgccaggtattccagatgcagagagcagtgtagtaaaagtgccttcaaatggtcaggagggagcagggcagttaggagattgacactacaagtggagcctcacttagggaggcttctgctccctgaaaatgggtctggacttaatcttgcaggcaataaggagaccctgaaagcttttaactcagattaaaaatggaccagatgagaaagtgagcagttcaactagtgacagttatctggcctctgcctgttcccatctag[363 bp omitted]ctcaatgttggtcaggctggtattgaactcccaacctcaggtgatccgcatgcctcagcttcctaaagtgctggaattataggcatgagccaccatgcccagcctagaggaaggatcttaacctaaaaatcatccatgaccctatactgttcaaaaatgcctatcctaagaacacagcatcccagtgttcttaagataaaattcagactcctcaccagggcccacaaggccaagcacaacctgacctctgcctcctctccatgcagagggacaaaaggcactccaggtctggggaagtgagagcctttttatatcatttgttcaaaaaacatatgctgagtgcacatacgcaaaggcctgttctgggcatttgagatatagcagtaaataaaacagaaatccctgcctcatgtagcttttcatctttgagagaagttacagagtatgtgacaaacaaagatctggtgagagaccagaaacaaagcatcagtgatgggtaggtggcagacaagggtaagaggaagtaggtgggtctaggcaaggggtctgcccagtggctgaggcctcacagaagagcagaaccaatactggcccaaaggctcagagctgtggatggcagtaaggaagcgcaggggagagcctctgcctctcaaagcttgggggctctcaggaagactttgactcttgccaacaggaaacaaagcccacttaccaactcctgaattttgactgcctctctcactgtgctgagccccttgagggcagagaatgccctccatatctatccaggccagtgcctggcccagatgtaggaggtgtgacaggccattaggctcatcagcacccatcaccttctctccttccaggatgcacaggtaaggcacagctcagcttccctccagtagaaggtaactgggctctggccactgcaatgtgggaggcagtaacatacccatttcagactggccccaaaccccactgtgtcccctccatgttctttcttgcttgctgactggcagtgcaaagaatgcagtgggggatcaaggcctgaaaggtggtgaagctacagattggagtgacagggaacactgtccctgcctccaacacagattggattgcaatgtgagcgagaaatacaccttgttgtgttaaaagctgctcaaagggccaggcgcagtggatcacacctgtaatcctagcactttgggaggccgaagtgggcggatcacctgaggtcgggagtttgagaccagcctggccaacatggtgaaactgcatctctactaaaaacacaaaaattagccaggcgtggtggtgagcacctgtaaccccagctactcaggaggctgaggcaagagaatcgcttgaacccaggaggcggaggttgcagtgagccgagattgtgccactgcattccagcctgggcaagagggcaagactccgtcaaaaaaaaaaaagccgctgaaaattttggaatggataattatagcatttatgcacattggctaatacgagctcttacttgttaaatgtttattaaaatgtctccaaattcctctagccttggcagacagggtaaggcatttgggacaggttcagcaactgatgaacaggttcatctcaccaatgaggagtcccacccagatcagattctgtctctataggaagggtccccaagggagatcaacttcaggagaaagtcccactccatgttatgcccacctttccaacatgtactccaggttggtcagcctcgcttcacctggggagatgatatggacagcataggagctgagggagcggtggataaacccctggaaatgcaggtatctcagggcatcagatatctggagcagcaggtgcacaatcacctccatgtgcagcactgggaactgggaccgctgcaagcaagagatgaaatgccacgaaaaaaaaaaggactggggccctgacactgtagagcattttgtgatttccagtctttccatatgatcctcatggttaccaaggatccccattttacagatggagaacctaaagctcagtgaggctaagtgaatggcctgacgtcccaatgactcaggccccctggatccaaacctggattcctttccctcagctgagctgcttcataccacaaaaaatgaaaagaaagttctcaaagtctggtatgtgcatccaggattggcttggggaaaactgacaggggaggtccccccataccaccagtaaacctgccctgtcgcctccctgtccaagcccaagctgctggggagaacctggaagctcaaaggaccctgcagaatgcagataaccaattcagtcctaccccagtcagatgagacagaaagtgcctcctaaggggacagaaattcactcacatcaatgcacctggctgactaaagtcttaatgggtctctcccccagagaaatggtctttaaggtaataccctcactcaagggggaaaaacagaaaaaaacagaataggaggtcctcaggcagaaggaatggcaagccatttgggggaagagcccttcttggggtctccttacttctatccaaagtatttagaacaaagtcatggaggaaaaaaacctaaatactccaagagctctctaaacctacatctcaggccaaagcaccctttccagggactctatacaagccaggaaagatgtctcccaaccccaaggaaatttgagaggtgagaggggagtgatacaggcctctatagaaaaaactgggagagagcacaaatgaaaatgtaggaaaataaagccagtggctgctggattatagttagtcaaaggtgtctgtattttctgggtccactgcgctcttagatgtctgatcaagaagcaggactaggctggctgcagtggctcgtacctataatcccaacagtttgggaagctaaggcaggaggatcacttgaagccaggagttcaagaccagcctgggcaacatagtgggaccatgattctattaaaattttaaaaattagctgggtgggggctgggtgcagtggctcaagcctgaaatcccagcactttaggaggctg[134 bp omitted]gaggcatgagaatcgtttgaaccagggaggcagaagttgcagtgagcagagatcgtgccactgtactccagcctgggtgacagaaggagactcttgtctcaaaaaaaaaaaaaaaaaaaaaaattagctgggcatggtggcatgcacctgtagtctcagctacattggaggctgatgcaggatcatttgagcccaggagttggaggttacagtgagctatgatctcactactgtactccagcctgggcaatagagcaagaccctgtctcaaaaaaagcaggacaggccgggtgcagtggctcacgcctgcaatcccagcactctgggaggccaaggtgggtggatcatctgaggtcaggagtttgagaacagcctggccaacacggtgaaacctcatctctactaaaaatacaaaaattagccaggcatagtggcaggcgcctgtagttccagctactcgggaggctgaggcaggagaatcacttgaatccaggaggtagaggttgcagtaagccaagatcgcgccactgcactccagcctaggcaacagagggactctgtctcaaaaaaaaaaaagcagaactgacaataataaaaccgtactaattctgaccatgtgcttatcagccttaaatagcatgttatacagcccctataaagcaaaagaataaagatatttatcttccatgcatgcagaaatgggatcaccacagctggggcaagagggtgaggagggaagaaactgggaggtcagcaatggaaaatccacggaaacagcagtttactcgttcatgaaggacactgaacaatgtgccgatagtgatgcgctcgtacacaaggcgggttttctctaggtcctgggagagacacacagccatcaactgtagcaagtaggggtgccgcagcttgctgcaaaagaaaagaagcttcagataaggcaggtgagaggaggatatgatgaaaaaatgagcgtaggccttttgaacacattctaaacaaataccatttgtatacgatgttttcttttcttttcttttttttttgacacagagtctcactgtattgcccagtctggagtgcagtggggtgatctctcggctggctcactgcaacctccgcctcctgggttgaagcgattctactgcctcaggcttccaagtagctgggattacggatgcccaccaccacttgcagctaatttttgtatttctagtagagatggggtttcaccat[136 bp omitted]gttggtgagggtttctgttggaatctgtggccctaactgatgagaccttgagagcttagagccatcaatgacaacaatgacaatgtggccaagagctcctgtattctttgcatacatcgtctcagatcctaacaaccacctgcaagaaatgtatcattatactcattttatagatgaggagaccaacatcaaggaaatgtcagggcctggtgcagtggctcacgtctgtaatcccagcactttgggaggccaaggtgggcagatcacttgaaatcaggagtttgaggccagcctggccaagatgatgaaaccctgtctctactgaaaatacaaaagttagccaggtgtagtggcgcacgccagtagtcccagctactcaggaggctgaggcctgggaatcgcttgagcccaggaggtggaggttgcagtgagcctagatggtgccactgcactccagcctgggcaacagagcgagactcaatcctaccctccccgcaaaaaaaataggaagaaatatgtcaggaattcacctaaggttgcatgcccaactcagtctcatgtcaaagtctatgttgcccaggctccttctttcagcttcctttggtcccttcaagccgacttccacaaaaagaagaatgtggcctctctacatgcctcctgcagaagttgaggagccttcttaggagagagctcgataagcctgggtccactgaatgaatgaatcaagaacctgtcctagcaagagcagaaggacttaactctggagccataggaaccctaaggtctggagatccatgagcctgtcctcaatggcacagacatgtcctcagacatctggatcttaagcaagccatgctctatgaaaacaggatagccacatgccgtcctgatgggcacagggcccaaagtgggtggactcagggattgtagcatgagaatcagaagggcctgcatggaggctgcagcattcagagacatgggttacagggcggctgacagctgacagagcccctcaccaccactgtccccactgctcaggctactcgttaacttctcttcctctttcctggcagcccttcgaagtcaagtcaatcaatttcaacagtcaggaaatgctgagactgagagcagctggagctccctatcccaggcacagagctgaatagcccagaacctgagtctgtagagagacctggacctataaggggccttgggcttccttctcacctgctgtgttcctgctcggcaattaacaagtcggccagccgcagcctgctgcagtgtgggtgggtggggagattcagctctttcactgtgaccctgctcccattccacactaggctacaaggacaggaaagagtttcagcagaaaggagtgagcagccacttactccttcaatgaataagctttcctaagcaaggaccagagaaatggtctccacacagaacctgcaatgcccactgggcactactgggtcctctctcccactacccacccccaggtactaaagcaccctggagaacttaggtataggtggtgggaagtcactgaatgcaagggagagagtgacttgatcaggtttgtattcaaaaacacaacgttaccggcaatgtggggaatgggtaggggaggggtggtccagagaatgggaagccagttaggagaccaccccaggtgagggatggtgaagacttgggcaaaggcagcagcaataaaacagcttctataggggcctcattacccttgacctgtatcagaggcaagacagtcactaccaagctgcctctaattcttcagagagcagagacattaaagtattgtaatgagtaatctttcagagcagtggttctcccccagaaacctatggcaatgtctgtaagacagtttggttgtcacagctgtgggggctgtaagggactgcaactggcactagtgggtagagaccagggacttctaaacattctacaatgcacaggactactcccaacaacaaaggatcatctggccaaaaatggtaatagtgtcctggctgagaaaccctgatttagacagatgttcttaggtgttccctgtgtttgagtagaaactccccacacataaggaagtcacatgcagcccactcttcccctgaaactgaatcagacctcaaactggccagcccccacttacttggtcatgaccatgtaggggccgctgaagaaagagaaggtgggctcatcatcagcttgaatcacttccttttctccaatgaccggaagagatcctagataggccatctgtgtcgccccagtaagataaaactgaaaccaaggcatagcctcaaattatggggagaaggggggaaaagcagaatacatccagaatcttatcagccagctaaaagaatgagagctgctatttatcaactttctgaatacccctatgcactgggcctttttttttttttgagacagggtatcactgtcactcaggctggagcatatgacatgatcttggctcactgcagcctggacctcctgggctcaagcgatcctcccactccaccctcccaagtagctgggattacaagcatgcaccaccacacctggctaattttttttttaaatagagacgggcttttgccatgttggctggtgtcaaagtcctgggctcaagtgatccacccaccttggtctcccaaagtgctaagattataggcgtgagccaccaggcctcaccacaactctttatattatctttaatctttctaaaaacctttcaaggttttattatttcccttttgttcttttccctgaagaaactgaggctcatggaaagaagtcagatgcctcaagtgccattgctgggactgagaagcccattgtggtccccacagcacccaggattgtgtgcggccaaatctgatattcctcctctccctccccaccaggctgcctcaacacaacaaacagaacggggagtagggctgggcgagttggctcacgcctgtaatcccagcactttgagaggtcaaggcgggtggaccgattgagtccagaagatggagaccagcctgggcaacatggcgaaatcccatctctactaaaaatacaagtaaccaggcatggtggcacacacctgtgatcccagctacttggaaggctgaggcatcagaattgcttgaacccagtaggcagaggttgcagcagtgagccaagatcgcgccactgcactccagcctgggcaacagagccagactctgtctcaaaaaaataataattaaaaattaaaaactaaaaattaattaatgaaaagatcattttctaaactcaagtgtagcccagggtcatccaagggaattctctggggttttcacaaatttgttagtaagacaggaacactaagagatacctttccctcaataggggcaaaaaagaaaagaacaacactttggtgaggataaggaggcaggagttggacaaaggtgggagatggggcccgatgattctccagttagtcctgcaaacactggctgtcagtggcaacctcttaccttcccaaaaccaaagctgtagatattttgagcagaaatgactccagctttaagcagtcggttaggagagccattagggtttctagaaatatttaaaacaggaaaaaaacctcagaattaaccactcatatccagaataataatgctgaaccaagttttcagaaggtgtagttgactttgtctttactgctagactttctgttacaaaactagagatgatgtaacagccagcctctgagagggcctctatgattctcacttaccggtatgcataaccttgtgtagcccctcacaggtcacatggggctgacctgttaactcatttttgactgttaacagtgcaaaacagtgatagtctctcactttgaggctaaatctaccaaggcgtcagccctgatctctcttggatcatttgctctgccagctgccatgatatgaggacattcaagcagccctgggggaggctcaatgcccagcaccaatttgccagccacgtaagcgagccatcttggaactgaattgtccatcttcagtcaagccttcagatgaatacagccctaactaacatcttaactgcaacttcattagaaactctgagccagaacaacctagttaaaccattccctgattcctgacccacagaaattgtgtgagataaaaattttattgtttgaggctgctaagtttggggggtgattcattatgcagcaatagataacaaatacagatggtcagagttggaaataaccataagcacatcttgtccagttttttcattatataggcaaaaaaatgaagcccaggaaaaggaaacttgctggcctgaggtcataaaatgcagcagtgaccagacactgatgttgctcattccagccactgttcttcccacattccacactcaaactaccacttgtgcatcagggtcccccttcactgaaggtgtcttggaagaaggggtgatgcctcgtatttctttggctcccagaacctggcatggtgccatgcagtaggtgctcagttaatgcttgccagttgagtactttcagctcagactgaaggaaaaaagatcctactgccaccagaggcactttccttttcttggcaaatggcaaaggagctgggagacggtgcatactcagggccagccctacctcaggtctgtgaggccccacatgccactattagagaacagatgtaagtgctttacttcttttctatttcctcagcaactcatcagtgccaagctgtcccgtctctgctttaagctgctatgctattgaggagaagactctgatgtttagactgagataaactgagcatcccaatttacacctggtatcttagcaccattattgatagtttccctttcactctcgaaacagccaacagataatcagctatatggtcactctcacttgagtaaacagaccataagaaaaaggccacttttcaacaccaaatcatcagtctcttcttaaaataaggcttatgtgcttaggcctcaaaagatctaggagacagtggaccgtttcttgcccaggggaacagaccttgtgctgacagtgagggtgtcagcctctagcagcagtggaactgggggttaccagtgacgaggcctcctgccttccactctggggcctctgggcagtacatggctctttggaggggagagttctttctaagcaaaagagccgagtgttctcaaacagtgacctggacaactgcagttcagaccaacatttcctgctctcttacctaaatttctcagcacacatctatataactcggctgggttaaggggagaaaaaaactaactctagtcatctacagccatctgtcctcaactcagtgcttttcttctttccccagtccaagctctgtgcaaacacacgtgtgaggaatcttatctgacacggcaccactcacaaatcttagaggctaactctaatttcaagaatttgtgtggttttttacattaagaggagggggggcgggcacggtggctcacgcctgtaatcccagcatttcaggaggcagaggcaggcggatcacctgaggtcaggaattccagactagcctggccacggtgaaaccccatctctactaaaaatataaaattagccaggtgtgctaattttatagtaatcccagctactaaggaggctgaggcaggagaattgcttgaacccaggagacagaggttgtggtgagccgagattgcacggactcctgcctgggcgacagagaagactcagtctcaaaaaaaaaaaaaaaaaaaaggtgggggaagaggagtgtatttccatgtaagcattccattaaccccgtaagaatgtttcctctaattctaaactaaatgctgtatctagatgagtaactaagattgtaaaagctcatccacatttacacttgggttttcctttcaggctcactcatgagcctcctctccttgtacagagccctaccatgcaccaagcagctaagggttagtagcaatgaataggatagacacagcccctgagctcttggaattcacaatttaattggaaaactggagaagaacatatacaaataaaataattgcaaactatgacaattctctaaactctgaaggacgggtctccatacaagcgccaggggcagaggcaggagatgaagggggagggcttggatgaggcagggtctccaaggccggataagggatttctaaacctatcctaatagccatggggaaggtccttaaggagttttagcagagtggtacaacctgatttccattattttagttttatttgattactttattttttgagacaggatctcgctctgtcacccagtttggagtgcagttgcatgatcttggcttgctgcaacctccacctcccagattcaagtgatcctctcacctcagcctccagagtagctggaactatgaggagcacaccaacacactcggctaatattttttttttttgagacagtgtgttgctctgtcacccaggctggagtgcagtggtgcgatctcggctcactgcaacctccgcctcctgggttcaagtgattcgcctgcctcagcctcctgagtagctgggattacaggtgcatgccaccacacccggctaatttttgtatttttagtagagacgggggtttcaccatgttggccaggctggtctcgaactcctgacctcaggtgatccacccacctcaacctccaaaagtgattacaggtgtgagccactgtacccagccacctgatttccatttttaaaaggtcattctggatgctgagcaaagagccaaaactggccagagtggcacgcagcacagccgttaggagttaacggaatcatgaactcatctcgcctgagaagccagcagcatccaatcatcagaggaaagccaggactcaaagtgcatgaatgacaggacaaggaagcctgcaaaagtgtggtgagcccagctaccctgcttacagaaagagatgccatcagaggaaagccaaatgggaaggattctctacatacaaaccctaagtcaaccaatcccagagaagttaaaatgacactcctcccttccaagcttaaccctgagcatggagaaaagcatggagcccacctcctgcagctgtgatgggagaagagggggctgcccatccagctggcagcaagtctctcgtatcagctgaaaatagcccaagaaaccgtaagttaagcatttgtggtcttttgcaaccttagtaataaaggaacactctttctgtggttcaggagatgacaaaaaagccagccaggtgtcctgctgggtaagggttttctgctgggctcctcagacctgagatgttctccttctgctaaccacagggtggtttccatcagagcccacactcattcctctcacaccttctcagggagaggagagagagggcgaaaggtgatcctctggccttccttcatcaaggccaagccttttctttccaagcacacccctttggatgggccagatgccagagggcactgatgtggaggagctgaggcaacccatgctgcagggctcccacgaggaaggctgggtgatggagactatcccactctgctcaaggcagtactcacccctgcacgaggcccccacaccaggacgggctgtagacaagccgctgcggggagtctatcttcttcaggaggtcgtaagagaagccctggatgatggcctgcatgtgtgaggcacagcgctgcatgaactccactatctgcaaaacatcgcagagatgcccagtgcgggcgcaccagttctcaatggaatggaagcttgggtatgaagataagtggtccgaggagctgagagcccccaacagaaaaacctctcaaaaggaaagggcccaggtgattttctaaaggtatggaatgttttcagggagaggctttagggaaacaatttcctccaactccctccttcaacagatgaggaaaccaaggccaagacgagtaaaatttgctggtccaaggcccaacagctttaataagcaggagccccagaaaggagactgcacacagaggggcctggcactgtacctgccctttgagttttacatttatgttatttagtcttcattaaaacacatcacaccagctgggtgcagtggctcatgcctgtaattccagcactttgggaggccaaggtgggcgaatcacctgagtcaggagttcgagaccagcctggccaacatggagaaaccccgtctttactcaaaatacaaaagttagctgagtgtggtggtgcatgcttgtaatccgagctactcaggaggctgaggcaggagaattgcttgaacccaggaggcggaggttgcagtgagctgagctcgcgccactgcactccagcctgggcaagactccttcccaaaaaaaaaaaaaaaattcccacctgccaaacaaagttacttaatgtcagtgggcctcagtttccccacctgtacaataaggacattaatagtacttacctgagaggttgttgtgaagattgagttaatatataaaaaacatttaaaacaacatctgagtcatggtaagtgctagttaaatgggtcagacaaaattacagttgtttgcctttcccatcgaatacgatgagtagaaaggttcactagacctgccggaagtttcgcagctggctaatttgcttcgatccaagcctgagactccagtaccaatactaaggccactgtacgctctgtgctgaccactgggagcctgactctcagcccagtactcttctagtgggcatggctacagagtgggacccacccttacctgggtgctacgctcctttcctgctgtcaaagcccaagtcttcgggttttgacccctctcatcgtggagtcgcaggtcacctcctgcatccagcagtttgctaaggatccactgattgcccgaaaatgctgctgcatggacaggggtgctcccatcaaagcagcggctggggagggagatgagtacaattgatgtccatggcaatgctcctgcattccatggagcggggctcagcgtgcaacacagggctcccattctacaaggcaacgttggtgacgaggaatataacaacatcatttgtgaggcccctgtctgtgcccacaggaactttctgtacacacacacacacacacacacacacacacaatccctttttttccctccttcactcaacccttcaaggaagtatcatttcccaatttacagatgaggaaacaaaacggcaaagctgaggttcattcccaggcatagatctggttccaaatccaattttctttccccagcactctgatattggctgcccagaaacaatgtcttcacacctgcagtgtcctgggatcaggctagtcaagcacagcctaacaaggcgccacctctctcgtttgagaatgtctccccacagccccccaagaaaatcctgtggtagagcacaaaaccttggcatcagcaatgcagtcaaggatctacacctcagaaaaatttcacctcagaaaaatttcaacaaagccagtaaactgtctgagacatgaagggacagcctttaatgtgtccaggatatggtgaggatatgatgtatagccttagtttcctaacctggctacacatcagaatcaccagggaactttctctctttaactgaaaaagaaacacaaataggaggaggaggaagggaaaaaaaagaagaagaaagaaggagaagaaggaggaggaggagaagaaggagaagatgaagaagaggaggagggggagggaaggggagggggaggcagaggaggaggaggagaaagaaaaggatgatgaagagaagataagaaaaaagtcatccaactccagacacccagttctcttaccaagatgcaattactattacaagtttttgtatccttctggaaatg[146 bp omitted]cctgtgtctactaaaaatacaaaaaaattagccgggcgtaggtggtgcatacctgtagtcccagctactcgggaggctgaggctaagaatggcgtaatggcataaaacccgggaggcagagcttgcagtgagccgagatcatgccactgcactccagcctgggagacagagcgagactctgaatacactatacaaactcttctgtatctacatattttcttttcttttcttttcttttttttttttttttgagacggagttttgctcttgtcacccaggctagagtgcaatggtgtgatctcggctcactgcaacctccgcctcctaggctcaagtggttcttctgcctcagcctcctgagtagctgggattataggtgcccgccacccatgcccagttaatttttgtatttttagtggagacagggtttcaccatgttggccaggctggtctcgaactcctgacctccggtgatctacccacctcagcctcccaaagtgctgggattacaagagtgagccaccgcgcccagccttcatattttcatttaagaatctatcttggagaaatttccatatgagaaactacaagccatcgcttcttggccttttggctaagatcaagtgagaaactacaagccatctccattctttttaacagctacatagtatgccaatgaatgggtgtatcataatttagttaataatccactgggatatctgtcaaaagcacagattctcagactacaccttacactgactgaaacaaaatctgcaagcacaggacccaggaatgtggtttggtttggttttgtttttcaaattcccctggtgatactaaagaggctggcctgcacacaggcttataggaaccactgatcccattggttctcactgtaggctctctcccactgctgggcagagaagcagtccagcacactgcatcgtgggaatcacaatatcctccttgctgcaaaaacagctttgtataatgtcttaccatcttcttttttgttttttgggttttttttttttctttttttgagacgaagtctcgctcttgtcccccaggctgcagtacaatggtgcaatctcgactcactgcaacctctgcctctcgtgttcaagagattctcctgcctcagcctcccgagtagctggaattacaggcacctgccaccatgcgctcaggtaacttttgtatttttagtagagacgaagtttcatcatgttggccaggctggtctcaaattcctgacctcaggtgatctgcccgcctcatcctcccaaagtgctgggattacaggcatgagccactgtgcccagcctgtcttaccatcttctaatcattcctcccacaaacagtaagaaagctgggttaggacacagatgatattatttctcatttctcatgaatgctaaggaggaaaggaataatgatttatacccagctaagcttacaagaggatccaggtccacctggtatcaaaatgtgtactatcatatttatttattgtaaagcctaaaaactggagtctctgcctagccaactcagaagtttattttatttggtacacacagtgttcaaaaaaattgaaatagttggcaatatttaacatttgggagctttcatttatttgtttatttattttgagacagagtctctgtctgccacccaggctggagtgcagtggcacaatcttggctcactgcaacctccgcctcctgggttgaagatattctcctgcctgagcctcctgagtagctgggactacaggcgcccgccaccatggctggctaatttttttttttttttaatttttagtagagacggggtttcaccatgttg[131 bp omitted]ctcttggaaattcggaagatctggctttcctggctccctttcctgcccccctttcctgcccaacagcaatagatccctgaccctcctcagagaaaacctaaacccagttacttggtccagtaggcatctgatttgtgacttcaataggtccagtccatcacagcgtttccactgagcgtataggaataaagcctcctggctgggtgcggtggctcatgcctgtaatcctagcacatcgggaggccg[132 bp omitted]aaggctgaggcaggagaattgctggaaccctgtaggcagaggctgcagtgagccaagaccgtgccactgcactacagcctgggcgacagggtgagactccatctcaaaaaaaaaaaaaaaaaaaaaaagcctcctggctgggtgtggtagctcacacctaaaatcccagcactttgagaggctgaggcagatggatcacctgaggtcaggaattcaagaccagcctggacaacatggcaaaactaaaaatacaaaaattagtcaggtgtggtggcacgcgcctgtagtcccaggtactcgggagggtgaggcaggagaatcgcttgaacccaggaagcagaggttgcagtgagccaagatcgcaccactgcactccacctggaaaacagagtgagacttcatcaaaaacaaaaaaaggaataaagcctcctcccagaaattccccttcaccttgatcagataaaaattttttaaaaactttttttcccggtacctctatgcagccaatcatcagatattttttaagtcacatgaaaatgttcccaaccagaaaatacaaagccataggggtttgccatcctctcttgttattgtccctttccacttccttcctggcattgcctggcattacaagtgtccttcctggacacttgaaaaagggaacttctttaaactctgaggtcttcagaagctgggctccttcctgatctcagctgtgtcattaatactatgtaccatattatgggctagtctcaattccctgatcttgaaaattaaaggtttgaatggtttgatctttaaagaaatcagctttaagcctggacaaagcagttgtaaatgcagatgactataaaatgtttcaatttttatctgtatttttttatacaggcttttaaaaaatggtttatgtttactgaacagaattatactgtcatacagaatatgaaagtgatgatggtcatgactatatcactcaaggcgatgtttatacaccttgtttcagtaactaaaagaagtgggaaatggccgggcatggtggctcatgcctgtaatctcagcactttggaaggcggaggctggtggatcacctgaggtcaggagtttgagatcagcctggccaacaaggtgaaaccgcatctctactaaaaatacaaaattagccagctgtggtggtgggcacctgtaatcccagctactcgggaggatgaggcaggagaatcgcttgcacctgggaggcagaagttgcagtgagccaagatcatgccactgcactccagcctgggtgacagagcaagactctatctcaaaaaaaaaaaaaaaaaaaagtgggaaaaactgaagaaaaaagaaaatgttgcatttttgctgaagaactgcagactgtcccaatatggcctccctacaacacgggtatatgcaaacatcaggtgagccagcccccatgccaccttttttttttttttttttttttttgggtatagacagggtctctgttgcccaggctagtctcaaactcctgggctcgagcaatcctcccacctcacctcccaaattgctgggattacaggtgtgagctactgcatctggctgacccctttctctccgggctttgaaattaaacaatacggtagagccagtagagcgtgtgtgagtctagaaaaattctgcaaggaaacacaacaaaatgttcattgttttaagttacctctggttacttaattctcatactgattggcttttttctttgtgcttttctaagcttccaagttttcttcccctaagcaattttataaccaatccctccacaacacacatacataaaatacaaaagctgctcggcacggtggctcacatctgtaatcccagcactttgggagactgaggcgggcggaccatgaggtcaagagttcgagaccagcctgaccaacatagtgaaaccctgcctctactaagaatacaaaaattaggccgggcgcagtggctcatgcctgtaatcccagcactttgggaggctaaggcgggcggatcatgaggtcaggagatggagaccatcctagctaacacggtgaaaccccatctctactaaaaatataaaacattagctgggtgtggtggcacgcgcttgtagtcccagctactagggagactgaggcaggagaatcacttgaacctcggaggcacagattgcaatgagccgagattgcgccactgcactccagcctgggcaacagagtgagactctgtctcaaaaaaaaaaaaagactacaaaaattagctgggtgtggtggcacgtgcctgtaatcccagctacttggaaggctgaggcagaagaatcacttgaacacgggaggcggaggttgcagtgagccgtagtagcgccactgcactccagcctgggtgacagagcaagactccatcacaagaaaaaaaaaaaaagtacaaaagcttccaatatcaataatttaagcaggtacattaaacagagcctccttaagtaagatgggaaagactttatgattgttcatattctagcattcctgtgaaaatcagcttgaatcacttaagtgcccaaaaccccagtttctggttctgtttaatgggaactgaaaaatatccaccacccactctcccttctctgtcaagaaggtgtcaaataagctaatatttgagaaggccctagcaaaagccgaagtgcttcacaaaaagagatgttcggccaagtacagtggctcacacctgtaatcccagcactgtgggaggccaaggtggatggaggccaggagttcgagaccagcctggccaacatggcaacaccctgtctctactaaaaatacaaaaaattagccaggcctggtggtgcccacttgtaatcccagctactagggaggctgaggcaggagaattgcttgcagccgggtggcagaggctgcagtgagccaagatcctgccactgcactccagcctgggcgacagaggcagaccatgtgtcaggaaaaaaaaaaaaaaaaaaaaagtagatgttcacctgtcactgatt[234 bp omitted]gaggcaggagaatggcgtgaactcgggaggcagagcttgcagtgagccgagatcgcaccactgcactccagcctgggcgacagagctagactccgtctgaaaaaaaaaaaaaaataaataaataaaatttagaccaactattaaactccgattcttttcgtgtttcgtg[142 bp omitted]caaaattcacccttttttttttattttgagactgagtctcgctcttgttgcccaggctggggtacaatggcgcgatctcggctcactgcaacctccacctcccgggttcaaatgattctcctgtctcagcctcccaagtagctgggattacaggcatgcgccaccacgcctggctaattttttgtatttttagtagaggcagggtttcaccatgttggtgaggctagtctctaactcctgacctcgtgatctgcccgccttggcctcccaaagtgctgggattataggtatgagacaccgcacccggccaaacgtttttctaattagtttctaaacaaactcatcttaacagcacaacccctattttctagacatcaatattattgtacttactgatttggatctgatccataatccaccagaacatcaacgaatttcctaaggcccaataacgccgcaacaaaaagtgctgtttggcccaaggagttaactgcatcaacataaattcctgcaaaggaaatatcagaatcaatgcaaatatcagaaaatttcctgagaaggaactgggtagggggtgggggaattacatatttttatagtgtactttcatatattgctgtgagcttttttttaaaaaaagtacaaagaaggtcttcattagtagcacatagatatactggaaggcaaactcagtgtttattcatcaaaaatatttgcagaaagttgcattgaagcatttagttcaccacactggcatattataaaatggattaaaatggttctcaatcatgggaaaggatgagggagggactaaagatactctgtgtgttgggaggaaggctataacataaaaagagctcaatggaatacaagtcctcacctaaaagatcttactaaagtgtaaagactaattcgacaagggaaaacaaaacacataaaacagaccaatttccagtactatcaaacaatgagtctgtgaataattaaaagggactgaaaaaaaaggccaaagtagtaacatgaccaggaaaataaataaaaaaggaaaatatgccttacctaccaagaaaaaaatttagtcctccagaagaccaaaaaacaccaagaaatacaaaaattgaaatcccacaagcctggaggcgcagtggctcacgcctgtaatgccagctctttgggaagccgaggcgggtagatcacttgaggccaagagctcgagaccaacctggccaacaaggcgaaatctcctctctactaaatatacaaaaactagcggggctggctgcgtacctatagtcccagctacttgagaaactgaagcatgaggactgcttaagtggcagaggctgcaatgagccgaaattgtgccattgcactccaggaccacagaaaaaagccccagctcaaaaataaaaatgcacatatctcacatctctcaaaacacacaaaaagcactctgcacaatcctaagttaaaatatatgcatatatacacaacacatctctcaaaacacacatctggcataaccttatactcaaaaattaaaaacatgaggaaaccaactactattaacatctgaaaaaaaaaaaaacccagaactactcagactgccttctctagagaagaacggtcaccaacagcaaacagcagttagaataacgcaacaccaaacactgctatcccactcgtgagagaacacaaatatctccctctcgcggtttccagcgttctacacgttcagatatactcctcgagaaacacactatagaaattatccctcaaaatatagtcttaatgtccatttatgtgccttccacatgcgaaagaaactcacacatattatgctgatggtgagtatttcgtgagcacattttcctctcgaaaatattactatgtgttttttccaaaaacgatctttccactaccaaagttcgaaaaagcatttaaaataagctcaaaatttcgaagatactttaggcaatcactgtaattaacatatggtagcaaagcatgcaaatcactcagagctcctttctaaccccgccccattttcctccacgcgtaacgctgacgactataaagcgcgccggagcgccagaaaccgtcagggaaactgcccggtttggactgatgatcggaagcaagaaggcccttcgagaataaccaaagagtgaagggaaagcgataattcaaagccaaagattgtgatatttgcatagcgcgccctattatattttatactgtgatcaaaattccacacacttaaatattttgtatttcttccccaaaaaccagggagtttttattctacatggcattgctgtgtttatttttttctggttttcgcactgttgcccagggtggccttgaactcctgggctcaagcgatcttcccacctcagccttccaaaatgctgggattacaggcgtgagccgtcacacccggccattgctgtgtttaaacaagcaggacaacatattcccctggtttaagcttcagtagcttcccatttgttaaggtacagacaaaactctacatacttatgtgagaaaatactttaaatggtccattttcaaggcataataaatctaagtactggcagccggcctgcaaacgtaaccgcacagctcacgcacctaggtcacgataagcgaacagaatgtagaggaggggtcagcccataaaagggaagaaagtttctttactgggaatcgaaaattaaagcagggaaggggagagggtatataaccttataagggggataatgaaacttaggcgacatccggaaagattgtaacctcatagtactcgaccaatgaggaactgggggagggacttggatgctaggagataaattataccagacacccaatcttgcaagacccctattaaaagtctcacttccgctgttcttcgtgcctctaagcccattctttgggtttggaaaggtaagtgtatttctcgcacttaaaaggccctgtatggtctggcccctctctcgagtccatctctcaagtctcattctccctcactccagccacactctggccttacagttcctcatactcgccatgctcctttctgccacagggcctttggacaggctgttctccctgacagggattctcctctcaacctctaatcccaacttatcttcatcattcagacattggtccaaatgtcattgtctcaggaaatatttccctgacctcctttagcagatcaaacacctcttctatgtgatcatttgattaatgcctgccacctgcatgagactttaagtttcagactacatgaatggctttgggtacccacaatatcccaagcacctaataatgaataaatccaagtaaagatgtccagtgaacagaactgcagaagataaaggacattaacaatggccaattgtaagccataggggaaaataagtcaaacatactacccaaacagcagagggttaaagctggaaccctgaggcccactaccatcttgaggtaagctagggctggggatggtggctcacggctgtaatcccagcactttgggaggctgggcagatcacttgaggtcaggagtttgagaccagcctggccaatgtggacaaaccccatctctactataaaaacacaaaaattagccgggggccgggcgcagtggctcacgcctgtaatcccagcactttgagaggccaaggcaggtgaatcacaaggtcaggagctcgagacctgcctggccaacatggtgaaacctcgtctctactaaaaagtacaaaaattagctgggcatggtggcacacgcctgtagtcccagctactcaggaggctgaggcaggagaatcacttgaacccgggaggcagaggttgcagtgagccgagatcacgccactgcactccagcctggtgacagagcaagactctgtctccgaaaaaaaaaaaaaaagcaaataaggaaagaagccaaaaagtaggcagagattagaggaaaacctggaagaaatgggtcacagtgacaaggaaggttaaaagtttcaaaaagaaggatcagtcaac[131 bp omitted]caacatggtgaaaccctgtctctactaaaaatacaaaaattagccgggcttggtggcacatgcctgtaatgccagctactcaggaggccgaggcaggaggtttgcttgaacccgagaggtagaggttgcagtgagctgagattgtgccactgcactccaacttgggcaacagagtgagactctgtctcaaattaaaaaacaaagaaagaaagaaaaagaaacagtgttcatggtgagagcagtactagaggggttcacatgtcttactgctcagggcttgctgtgttacaaatatttgtggtatgtctatgtcctctaccagactgtctctcctacactagaaggtaggaactgcccaatgtatctcccctatcttcagtgccttgttcacttatctgcccaacacaagccagcctaagagtagagaagagcagcagagaacagtaaaaggacaattctgcatggatctctcagagttacgcatgtcatgggggcaaggcactaacctgttcagggcacctctttgaagatatttgtataatgaagtttggaaggcagatagtatctacattcacagcaaagtga[143 bp omitted]aaaactccacctttactaaaactacaaaaagtagccaggcgtggtggcgggcgcctgtaatactagctactcaggaggctgagggaggagaattgctggaacccggaaggtggaagttgcagtgagctgagatctcaacattgcactccagcccgggttgacaaagcgaaactctgtctcaaaaaaaaaaaaagttaaaaggaaaaaatgctgatattctggctactgctgttgctatgagtaataaaccatcattcatctatgaccccaagaatctcatccatacacatgtagcagtctaatttatcaaatctcaaactatttatagttattgacaagaagaaattacagtcaagggaagcaggctgacaagaaattatagttattgacaagaagaaattacagtcaagggaagcccctcccagg[132 bp omitted]cctctgcctcccaggttcaagtgattctccggcctcagcctcctgagtagctgcaattacaggcacgcacaaccatgcccagctaatttttgtattgttaatagatacagggtttcaccatgttggccaggctggtctcaaactcctgacctcaagtgatccacctgcctcggcctccaaaagtgctgggattacaggcatgagccactgcgcccagcccaccaagggcttctctttttttttgagacagagtctctgtcgcctaggctggagtgcagtggtgcgatcttggctcaccacaacctccagcctcaccataacctccagcgggttcaagcgattctcctgcctcagcctccccagtagctgggatcacaggcagccgccactacgcctggctaatttttgtatttttagtagagacaggtttcaccatgttgcccaggctggtcttgaactcccgacctcaggtgatccacccacctcagcctcccaaagtgttaggattacaggcgtgagccaccgcgtcccaagggcttctctaaggatcagaaaccacttaggggaaggcacagagcaacaaatcttgaggggatacaggtggcaggaaagaaaaataggtgaaaacctctgtccctacaacttaagcaaacatgacctttggagacttcctaataaaaaataacatttattcattcaacaaataattattttaggccagcattgtacccatgttgtggctgctataaaggtaactaaaaacagtcccacaagaagtgaccagaggcagctatgacatggtacaaagactggccgaaaaggttaaaagacctggattcaaatgttgacatcctaataccaccctcataagcccagggcctccagatgggtcagtcacctaacctgtgagcctcctaggaggtaatatctgatattaacaataatgtgtgccaggcactattcttttaattcacttaatcctcacaactgtacaagaagaagaaactattattatcactgttttgtagatgaagaaatggagagagatcaatttgccagaggtcacaaaccagtctggttctaaagtccacgcactataccactgtctctgtgatattgtgaaatatgtatttggggccgggggtggtggctcatgcctgtcatcccagcactttgggaggcacccgaggtcaggagttcaagaccagcctgaccaatatggtgaaaccctgtctctactaaaattacacaaattagcggggcatggtggcatgtacctgtagtcccagctacttgggaggctgaggcaggagaatttcttgaactcgggaggcagaggttgcagtgagctgagatcgcgccactacactccagcctgggcgacagagtgagactctgtctcaaaaaaaaaagaagaaagaaagatttatttggggctgggcatggtggctcacgcctgtaatcccagcattttgggaggcagaagcgggtgaatcacttgaggtcagcagttcaagaccagtctggcgaacacggtgaaaccccgtttctactaaaaatacgaaaattagttgggcatgatggtgggcgcctgtaatcccagctacttgggaggctgagccacgagaattgcttgaagctcaggaggcagagattgcagtgagcgtgccattgcactccagcctgggtgacagaacgagactctgtctcaaaaacaaaaaacaaaaaaacaacaaaaaaacaagaaatatatatttggtcttcatgcctgttccctgacgtagagcttctaaaactctttgaacctctggaatgataagtatcttttgtatgctgatgctgactgtagctagtggctggggccacccagaaagcatcaggatgacagctggtcactggaaagaccgaagcatgatgagagggttgggactcttagccctgctccccaacctccggggaggggagaggggctgaaggttaaattgatcaccaatggctagtgatttaatctaccatacctacgtaatgaagtttccataaaaacccaaaaggactgggttgggaagcttctgaatagctgaacatggagaggttcctggaggatgggccagggagggcatggaatcaccaagctttttcccacatgccttgccctagacatctcttccattcagttgctcatctgtatattttgtgatatctttacaataaatgggtaaacctaagtaaagtgtttccctgagttctatgagccactctagcaaattaatcaaatctggggagtgggttgtgggaacacctgatgtacagtcaatcataagaagtataggtttacaacctactgcctttttttttttttttttccttttgagatggagtcttgctctgtcacccaggctggagtgcagtggtgcgatctcggctcactgcaacctctgcctcccaggttcaagcaattctcctgcctcagcctcctgagtggctgggattacaggtgcctaccaccacacccggctaatttttgtatttttagtacagatggggtttcactatgttggtcaggctgatctcgaactcctgacctcatgatccacctgcctcagcctcccagaagtgctgggattacaggtgtgagccactgcgcctggcctgtaaagatatattacaaggtattttatcaaagcattgtttctgatgattaaaaactgcaaaaataggctggacgtggtatctcatacttataatcccagcactttgggaggccaacccgggacacttgcttgagcccagtagttcaagaccagtctgcgcaacacagcgagaccttgtctctactacaataaattaaaaaaaaaaaatttaatgcagaaatagcacaatttgcaattgcaaaatcgtggaacaaacccaaatgcccatcaatcaacaagtggataaagaaactgtggtgtatttatacattggaatactactcacccataaaaatgaattaacggcatttgcagcaacctggatgagattggagactataattcttttttttctgagacggagtttcactcttgttacccaggctggagtgcagtggtgcaatctcggcttaccacaacctccacctcccaggttcaagcagttctcctgcctcaacctcccgagtggctgggattacaggcatatgccacgacgcctgcctaattttttgtatttttagtagggacagggtttctccatgttggtcaggctggtcttgaactcctgacctcaggtgatcctcctgccccggcctcccaaagcactgggattacaggcatgagccactgcgaccggcctggagactattattcttttttttttttttttttttttttggggagacggagtcttgctctgttgcccaggctggagtgcagtggcgtgatctcggctcactgcaagctccacctcccaggttcacgccattctcctgcctcagcctcctgagtagctgggactacaggcgcctgccaccacgcctggctaattttttttttatatttagtagagacggggtttcaccgtgttag[133 bp omitted]aacattgtatgttttcactgatatgtgggagctaagctatgaggacgcaaaggcatgacaatgatacaatgatcttgcttggggagttgaggggaagggtgggaggtgggcaagagataaaagactacaaataaggtgccagtagtgtatactggttgggtgatgggtgtaccaaaatctcacaagtcaccactaaagaacttactcatgttggccgggcgcggtggctcacgcctgtaattgcagcactttgggaggccaaggcgggaggatcacctgaggtcaggagttcaagactagcctgaccaacatagagaaaccacgtctctactaaaaatacaaaattagccgggcgtggtggcacatacctgtaatcccagctacttgggaggctgaggcaggagaatcgcttgaacccgggaggcggatgttgccgtgagcccctcataagacagtatgagctaggctccacggttctggtaaaggtgcctggtcccagacagtttaaggaaagggtgggcctttgactctgctagaatcaggctggatccggtaattgattaatctcagcagttgctcacaactatcctaagggtttgactttcgaacgctagggtcaggtcaccatgaccgtggcaggaaagggaacagggtgactgagacccagcatttaagaaaaagaactctggttcttatgccacatgtttgcactaccagttcacacttcttaaatttttaagataaagatgtttggtgaatttgacgtcatttcttccctgaacaaatatttgaatgctggtatacataatggtaatagctactggccaatcacggtggctcagtcctgtaatcccagcactttggtaggccaaggtgggtggatcacctgaggtcaggagtttgagaccagcctggccaacatggtgaaaccctgtctctactaaaaatacaaaaattagccaggtgtgatggcacttgcctgtagtcccagctactagggaggctgaggcacgagaaacacttgaacccaggagactgaggttgcaatgagcccagactgagccactccaggctgggtgacacagcgagactctgtcccaaaaaaaaaaaaaaggtattagctactatttactgaggtcttgccatgttcccagcgtcacatgagataagtactattagtaatcatcccagctttatagatggataaactgacacacagaaagattaggtaacttgcctaaggtcacacagttttgaaacagagctggtaggtcaggtgccagagcttattatcttaaccactatccagtttttctacgtgctaagcactatttctaagaattgggcatatagcaacagaataaagtaaataaaggctcctactcacatgcagagcttaccttctagtgtgtgtgtgtgtgtgtgtgtgtgtgtgtgtgagagagagagagagaatgataaataatgaggcatgtagagaattataacattgttgaaacagagagacgtggtggctatttatttacttatttattgagacggtcttgctctgacacccaggctgtacaagtggtgcaatctcagctcagtgcaacctctgcctcctgggatcaagccatcctcccacctcagcctctcgagtagctggggctacaggtgcgagccaccaagtctggataatttttttgctttttgtagagacaagttttcaccgcgttgcccaggcttgtctcgaccttctcagctcaactgatccaccagcctcaacctcccaaagtgctgggattataggcatgagccaccataccctgcccatcagtggttactttagatttcagaggttagggaaggagagggtttccctaaccactcaaaggttatttaagccaagacttgaatgattaaaaagtagccaatcaggtggctgagagcggtagctcacgcctataatcctagcactttgggaggccgaggctggaggatcacctgaggtggggagtttgagatcagcctgaccaatatggagaaaccccgtctctactaaaaatacaaaattagctgggcgtggtggcacatgcctgtaatcccagctactcgggaggctgaggcaggagaatcacttgaatctgggaggaggaggttgcgatgagccaagattggccactgcactccagcctgggcaacaagactcttaaaacaaaacaaaacaaaacaaaaaaaaagtagccaaccaggctgctgtgcctatggagtagccattcttttctttctttctcttttatttattattattattattattattattattatttgagatggagtctcattctctccagactggagtgcagcagcttgatctctgcttactgcaacctcccactcccaggttcaggttcaagtgattctcctgcctcggcctccctaacagctgggattataggtatgcaccaccacactcagctaatttttgtatttttagtagagacagggtttctccatgttggccaacctggtctctatctcctgaccttgtgatctgcctgcctcggcctcctcccaaagtgctgggattacaggcgtaagccactgcgcccagccaagtgatagatgttttaatccattatctcatttaatcctttaaacaactgaaggagaatagttgattatttctcctttcatagatgctgggtatagcatctgtcacactgctgaaggaaccacagttggaacctaagcctgtctggcactaaatcaagtccctgttctttctggtaagccgaaggggtcttcttcagaagtctagtctccaatcaattcatttctctaatgaagcattaaatacatcatctctcaaagttcagtctgaatgactcatcttcctggcttctaaatccctgaggaagcctacccatttacttctaggaaaagttagcaccaatttcacctcaattaacacatctcagatatgatgatgtgcaattgttttagtcacttaacttcctgctgtaaatttcctaccaggaagcacagggtcacatggacattcacatggcacagtgttctaatcaaccacacttttaattgcattatagcagcatcacaaatgtgaccatcaggttgtaaagatgcttagcagtcagtcttattcaaccgcctctcctaatagaatctcctcacagacagctctctttagagacagccaaatgctccgtacttaatttttttcagaaaaagggacagcgttggggcaatctggccaggtctgggacatatcttttgggttcagagcagttccatatatatatacattttattttattttatttatttttttttttatggagtttcgctcttgttgaccaggctggaatgtaatggcacgatctgggctcactgcaacttctgcctcccgggttcaagtgattctcctgcctcagcctcccacctagtatattttgaatttataaagtactttctggtcactttcatccaagggtcctatctctggtctgggcccttctatatctgtcttccattctctagtcctccaatctttctggaaacctctcaccatccatcccttggcctcctctgagcagtttctccaacttcacatgggtgtgactatcactccagtacattctcacttagttcatgtcacctcttcttgaagccttccttgacctccataaataacactgaccactatgagttttgtgtccctaatcatccttgtatgggcctctacatagctcactctgttccaaatacatttacttccccttactaaactgtgagctctttaaaagcagaaacatgtcttatttatctctgtatctccagcacattgcctggcacagtagatgcccagtaaatgctgactaactgaatgaatgatgaattcatgaatgtattgttccttccctcaagccctgctactgacctgttgggaacaacctggttttcccttccttcttattctactcctcccccaataaagctggcctgtatgttaagacagtgaggtacctgtcagcagggttcctggtcttttcttgcctatccttggtttcaaaatatgtctgtgcagtcagatcactcctctgagcttctggctcagatatccagcttctacttgacattgcatttaggtgaatcacagatatctcaaatacagcctacccaagctgacttagatcagcttcctcccaaacgtatttctcttttagggaataatatcactttcaaccacgttgctcaaaacaaaaacctagcttatagctgcagtggcatgtgagtctgtcctcccatctatgggaggactatggggcaacatagtgagaccctgtc[131 bp omitted]gaaaccccatttctactaaaaaaacacaaaaattagccaggtgtggtgatgcacgactgtaaacccagctaatagggaggctgaggcaggagaatcgcttgaacccaggaggtggaggttgc[137 bp omitted]cccccaaatacctcatagcctcctgcagccagagcagccatttgaaaatgcaaatctattcacacctgtgttacatgacggaggtaggttaccaaaaagaccaagctatgatagaggtttgggccctttaataccttaccctaccattaacctctagggagaggagaggggctggagactgagtttaatcaccaatgaccaatgatttaatcaatcatgcctacataatgagacctccataaaaatccataaatagggtttggagagcttctgggatggtgaacacactgaagaactgggagggtggaatgccaccagaaggaatggaagcccctccccctacacctacataaaaccctgggtatctcttacttttggctgtttttgtttttgttttttttgagacggagtctcgctctgtcacccaggctggagtgcaatggcatgatctcggctcactgcaaaatcagccttccaggttcaagcacttcttccacctgggcctcccaagtagctgggattacaggtgcatgccaccacgcctagctagtttttgtatttttgtagagatggggtttcaccatgttggtcaagctgtcaacctggtcttgaactcctgacctcaagtgatccacccacctcggcctctcaaagtgctgggattataggtgtaagccaccgcacctggcttttttttttttttttttttttttttctgacggagtttcgctcttttgcccaggctagagtggcaagatctcggctcactgcaacctccgccccccctggttcaagcgattctcctgcctcagcctcccaagtagttgggattatgggattataggcgcccgccaccacgcctggctaatgtttgaatttttagtagagacagggtttcaccatgttggccaggctggtctcgaactcctgacctcaggtgatccacccacctcggcctcccaaagtgctaggattacaggcgtgagccactgcgcctagccttggctgttcttgagttgtattcttttttttttcttaacttttttttttttttgagatggagtctcgctctgtcacccaggctggagtgcagtggcgtgatctcagctcactgcaacctccgcctcccaggttcaagtgattctcttgcctcagcctccagagtagctaggactacaggcccacgccaccatatccagctaatttttttgtatttttagtagagacgagatttcaccatgttgaccaagatgttctccaactcctgacctcaagtgatccacccaccttgacctcccaaactgctgggattacaggcgtgagccaccatgcccagcctatattagtctttacaacaaaattataaaattatattgtaggattcataactcatagatatattatggcttctataattttttttttttgagacggagtctcactctgctgcccaggctggagtgcagtggcgcgatctcggctcactgcaagctccgcctcccgggttcacgccattctcctgccttggcctcccgagtagctgggactataggcgcccgccaccgcgcccgactaattttttgtatttttagtagagacagggtttcaccatgttacccgggatggtcttgatctcctgacctcgtgatccgcccgcctcagcctcccaaagtgctgggattacaggcatgagccacctgcccggcctatggcttctataatataaaggataagagaaggggagaaatgaacctataaggttgcatcttttatgtgaagtggtacatcattaactgtaagtaaactgttagaagttaaagatatagacagtcatccctcggtacccatggggaactggtttcaggaccctcccataccagtaaaatccaaagatgctcaagtcccttatataaaataacatagtatttgcatataatctatctatgtatctatccacctacctacccatctaatcttcctgtatattttaaatcatctctagattatttataatatctagtacaatgtaaatactatgttaatagttgttagtcttcatttttgtttgtattttttattgtagtgttattttttaattgtttcctttttcctaatatttttgatacttggttggttgaatccacaaatgtggaacccacagataagcagtgtcaactgtattgaaataactagagcaaccactgaaaaaacaatgtaaagaggtatagcttaaaagccaatcgctattataagttaaaatggaattctaaaacatatttcattaacacaaaagaaggcaggaaagagaagaaacgaaaaacagagggtaaaacacaaaacaatataaaatgggagtttttacatcgaaccaaaatccttccaatagcccacaaggctctgactggtccagcccaggcctcccttgccagtttcatctcacatctctctccaccccactggttttcccgtcaactcatgtcaaccagacccttttcttttctagctcctctccatcctcagagcacaactcctgcctcatcaactccttttctttttcttttcatttttttcagagatggaatctcactatgttgcccaggttggactcctggggtcaagtgattctcccacctcagtctgcaagtagctaggactacaggtgtgtgccatggcacccggcttggtcaactcctcttcttccttgaggtcctggcctaagcaacacttcttctgagaagtttctcttgattaccccatagacaaggaggctcagatgaatcttgtgtgctgacttcacttcctgcccttctcagtacacttcagctcccaacttatgtctgtttcttctgttagattatggtcccaaagggcacagtcataatctgtaacaatcggttttctgaatgagctaaactgagtaggatacaatcaggagacaactttcccctcaagcacactctttttttttttttttagacagagtttcgctcttgtttcccaggctggagtgcgatggcaccatctcggctcactgcatcctccacctccagagttcaagcgattctcctgcctcagcctcccgagtagctgggattacaggtatacgccaccatgcctattttatgtttttagtagagatggggtttcaccatgttggccaggatggtctggaactcctgacctcaggtaatccacccacctctgcctcccaaagtgctgggattacagacttgagccaccgcgcccagcctggaacggcacaattaaagtg[131 bp omitted]aaaccccatctctactaaaaatacaaaaaaattagctgggtgtagtggcgggtgcctgtagtcccagctactcgggaggctgaggcaggagaatggcgtgaacccgggaggcggagcttgcagtgagctgagatcgcgtcactgcactccagcctgggcgactgagcgagactccgtctcaaagaaaaaaaagtggattctgcctgagatgcctctcaaggaggggaaggaagagccaaccaagagtgtgcttgaggtcaggcaaaaaaaaaaaaaaaaaatttgttccaccaaaatcaaaatctcaatctttcaacaaattccaatttctttctttctttctttttgttttttgttttttgagacagagtcttcctctgtcgcccaggctagagtgcagtggtgcaaccttggctcactgcaacttccacctccgaagttcaagcgattctcctcctgcctcagcctcccaagtagctgggactacaggcatgtgccaccaagtccagctaatttttgtacttttagtagagacgcggtttcaccatgttggccaggctgttctcaaactcctgagctcaagtgatccacccacctaggcctcccaaagtgctgggattacacgcgtgagccaccgtacccaggccgattccaatttcttccctcctccgcactgcaggatgcagcaatgctctgttaattctcctccttgcttctccactcttcctctgatctcaacgctgtttgtggcaactccagagctgaggcaagggggagaaccaataagacaaaaagaggcaatggccttcatactcagctgatgccccgtgtagcttctggctttatcctaaagcctgtccttttgtggaaggtgctagtgggtccttcaagtgcctccaccacactgtgcagaaccccacacaggccagtgctctcttctgctgacttcttgcccaccactcagctccctccctctaaagccctacctgcagcctctctggttgggatcctttcttccttcacaggtagaatccccttagatggctcagctacccactgtggagtctacttgtgcaagtgtgactaattactgctagcctcctatgctcaccaactggtgcaagtgtgactaattactgttagcctcctatgctcacccacccatcaaggactgctccaagtaggagacagatagcagtcttcttgcctcctcaactccagggaacactgcagcttcttggtgtgtcactctggtggcagcttggggtaggctgacatatttcaactgtacagcaggctgggactcaggtctcatctctcttgcctgcaagcaccacagttctctctgaggtttgcctgaagggcctcttgtcttgagactggca[141 bp omitted]ctcccgggttcatgccattctcctgcctcagcctcccaagtagctgggactacaggcacccgccactgcgcccagctaaatttttgtttttttagtagagacgg[135 bp omitted]ttgctcaggctggagtgcaatggcgcaatctcggctcacggcaacctccgcctcccaggttcaagtgattctcctgcctcagcctcccaagtagctgagattacaggcacccaccaccacgcccagctaatttttatatttttagtagagactgggtttcaccatgttggccaggctggtctcaaactcctgacctcaggtgatccacccacctcagcctcccaaagtgctgggattacaggcatgagtcatcacacctggccctgtgaatactttttaaagaatctaaggatcatttaaatgatatcctaacaagccctctattagactgtgggagaatttatcgccccttattctgcactctgaggcttcagatagaattcccagacacagatgaagtcctgttctatatccaggtacacatgttaaccccatcccttactctaactgaatatcaagcatttgaagatgcagaatattcaggagatgtctaggagataataaatgtcataatactctgatgttcactaaaaaaaagtgatgttcaatataggtatgctatgacttctagtgactgtctatccacaccattcactgtgagaaacagagttttatttattttttatttatttattttttaggcagagtagtctcactctgtcccccaggctggagtgcagtggcgcgatctcagctcaccgcaacctccacctcccaggttcaagtgattctcctgcctcggcctccccagtagctgggactacaggtgcccaccaccatgcctggctaatttttgtatttttagtagaaatggggtttcactatgttggccaggctggtctcgaactcctgacctcaggtgatccaccctcctcggcatcccaaagtgctgggattacaggcgtgtgccactgcgcccagcccagagttttatttttgtttttgtttttgtttttctgagacagagtctcacttttgttgcccaggctggagtgcaatggtgtgatctaggctcactgcaacctctgcctcctgagttcaagcgattctcctgcctcagcctcccaagtagctgggattacaggcgcctgccaccacacccggctaattatttttagtagagacggggtttcaccatgttggccaggcaggtctcgaatcctgacctcagatgatccaccctccttggcctcccaaagtgctgggattacaggtgtgagtcaccatgcctggcccaagaagcagagttttacaacgttttattttaaaacatatgtggatatgttatggagtaaaatgcaaaattttgaggggaaaaaaaaacccaggacctttcacataaatgattgagctcagtgtgagctacttcacctatggaccctaggggtagtacatggaaaggtttgataacttatttttttgctgttgagatgggatctcacctcagcctcctggtgtggtggactataggcatgcgctaccatgcgtgtagtgccaactagtgatttctttattttttattttttgtagagacagggtctcacagtgttgcccaggctggtctcagactggtcttgaactcctggcttcaagcaattctcttgcctcagcctcccaaagtgctcggtttacagataggtgggatccactgtgccagccatgagaactttatgagagaactattcagtgggataggtggaaaattggggttacctttctggacgtcttcaggaatgctattgaagcaagtggagaaaaaccaggtcaccctgactattccacaaatcagcaaagaaaagtttcagaagcctccccttcaatactaagaaaagagacaggggatcaagcaggacctctgcttacactgaaaatagcaggtctgggttcactcctgtaatcctagcactttgagaggctgaggtgggcagatcacttgagcccagaagttctagaccagcctgagcaacatggcgaaagcatctctacaaaaaacaaacaaaaaacacataaattagccaggcatggtggcttacgcctatagtcccagttatttgggaagctgaggcaggagaatcacctgagcccgtggaggttgaggctgcagtgagctgtgatcatgctactgcactgcatttggcaacagagtgagactctgtctccaaaagaaaaagaaaaaaaacaggagccaaacaccagaaaaggttgtttgtatatgggtttttgtttgttggttctttggtttgttttctcagaccaaattcacatgacatgtttgttggttcttttgaagactgcttcagccattgagccatgtctgcctgtatccttcagctagaaaaccccagaaaaaaggcaccaagtggaaataaggagcaaggaaggggacagctgtgaacactggcctccttagtcaaccacgggtgtcagagaacttaatggatggagcagatttcaaggaaagaaatcaggcagaatcaaaggtgggtgacttcagagaaaccataggagcctagcagtagcagttggatgcgcttgtggttccccaacacaaaacaaaacaaaacaaaacatcctcaaaatgaggatttaacacctctcttgactgcactgctagagaacatctaatttctacatttaatttctggatttccccaaggactcattcatacctttatgacattccttttcctctgaacgctattcagaaatgtgtaccaaggtgcatctgccatctcaacatggtgcttacctttcttaagaattttcttcactttcacatagttcccttgtttgacatactcatgaagctgagcttccagggagtcatttcttaaggtaccaagttgaacaggacaggggactggaagacgaacagcccgagacatcctgttccaaaagagagcaatatgcttattttaactgaaccagaaatgcaaggaaacaacttaattcttttacatttagaaacctgtccagccaccttcattaataatgaagattaggggaataattattgaaactctatgagattaatgtttttcctcagtgttatcgctgaaattaaagaacttgaatatactgttgaatatagaatggtgagaagagacaagtaaaaaatatatatatttgaatatatttgatatggtttggctccatgtccctacccaaatctcaccttgaattgtagttcccataatccccacaacgtcatgggagggacctagtgggaggtaatttaatcatggtggcggttaccctcatgctgttcttgtgaccagtgagtgaattctcatgagatctgatggttttataaggggcttttctttcttttgctcagtacttctccttcctgccatcacgtgaagaaggacgtgtttgcttcccatctgccatgattttaagttccctgaggcctccccagcactgcagaactatgagtcaattacacctctttcctttataaattaccaagtctccggcatgtctttattagcagcacaagaacagactaatacaatatttgtcactaattcccaggactgaaaaagtgaggacttctaggaagtaaaattctaaatacacgtttattgtgtcattaagataacttggagagtattgactttgaaaggttagaacacaaatgcagtcattatgtaaagctagatagtataacatagtggtttaggttcacagttcagactctgaaactgtcttggctctgtcacctccctgtgtgaccttggagaaattatttaacattgataggcctcaatttcttcatctgtaacatggggataataataagcagagggttgctgagagtttctttttttgtgtatgtgacggagtcttactctgtcatcaggctggagtgcagtggcgcgatctcagctcactgcaacctctgcctcctgggttcaagcgatcctcctgcctcagcctcccgagtagttgggactacaggcgcacaccaccatgcccagctaattttttgtatttttagtagagacgaggtttcacca[136 bp omitted]catagtacctggcaccaaacaagttcactgtagttgttagctgttactgtgcataagaactatgcagagaaattttaactttccaaatgtgacagccacacctgaccatcattcttacaatcaagtgtctgtggtgtacctactgctatggtttgaatgtgtcccccaaaatttatatgttaaaaactcgatccccaatatggaggtgttgggaggtagaacctttaagatgtgtttaggtcacgggggcaccactctcatgaatggattagtgctattgtcattataaaggaagtaggtcgttatggcaggagtgggttccttataaaaggatgtgtttgggagacgtttgaggtctctttccatctccttattctgcagccctatgattaaacctctttctctgctgcaacccagtgtctcactatactgacttgccacgtgggattacaatttagcagtgatcctatgaaaagatgccccttgtgggcatttaaccatggctcagtgccccctttgtggcagtccaggtttccatcagcagccagaacaatctggttccactaaccctttactataattttgatgaatgcat[136 bp omitted]atctttactaaaaatacaaaaaattagccgggcatggtggcgggcgcctgtagtcccagctactcgggagactgaggcgggagaatggcgtgaacccgggaggtggagcttgcagtgagctgagattgcaccactgcactccagcctgggcgacagagcaagactccatctcaaaaataaaaaataaaaagaattggagaaactggtgcctgagtactacaagggctggaatgcaaaaacaaacccattaagacaccacctggcctttctcaggccctaaagtctgatcaaataataatagcatttttacacatacaccttgtaccaaggaccacttaagaaactttccaagactctagagaaagctttccagaccctagatcctagttaaagattagatatagattgaatgaaacactccaccttgtaggtgcactcccgcttataggcatggaccttgaatgtatagaagctttggaaaaaaaaaaacaacttgtaacttttttttttttttttttggagacagagtcttgctttgttgcccaggctgcagtgtagtggcacgatctcagctcactgcaatctccacctcctgggttcaaacgattctcagacctcaggctcccaagtagttgggattacaggtgcccaccatcattaccagctaatttttgtatttttaatagagttggagtttcaccatgttggccagggtggtctcaaacttctgacctcaggtgatctgcccaccttggcctcccaaagtgctgggattacagaagtgagccaccgcacctggccaataaactcccttctttcccagtctggatctcattattggactgtgagaacaagaagctggacctcattctgtcctagaacaccctgacatttcggcaccccaaaatgtgctgggattataggcgtgagtcaccgcgcctggccaaaacttttaacttttttagttggtctgctgagttactccaaccttctccctgtaaccagttgcagaaataaactcccttcttttttttttttttttttcctgagacagagtcttgctctgttgcccaggctgaagtgcagtggtgagaatggctgaagtgcagccattctcctgcctccgcttcctgggtagctgggattacaggcgcctgccaccacatccagctaattttttcttttttttctttttgaggaatctcactctgtcaccaggctgggctggagtgcaggggcgcaatctcagctcaccacaacctccgcctcccgggttcaagcgattctcctgcctcagcctcccgagtagctaggcctacaggcacgcaccacaatgcccagctaatttttgcatttttagtaaagatgggttctcaccatgttggccaggatggtctcgatctattgacctcatgatgcacccgcctctgcctcccaaagtgctgggattacaggcagaagccaccgcacccggcgactaatgtttgtatttttagtagagatggggtttcataatgttggccaagctggtctcaaactcctgacctcaggtgatccgcctgccttggcctcccaaagtgctgggattacagaagtgagccaccgcacctggccaataaactcccttctttcccagtctggatctcattattggactgtgagaacaaaaagctggacctcattctgtcctggaacagaatgtcagaaccctgacatttcggcaccccgagacgagccctcctttaagccaggggccatgtctggcacctcccttgtaggcaggggcattgccaaccttaggcgcataagctggcttgcagcagagaaatggtttctgattccggaagatgtctctgatgattattcccaagcataatccatattccctttcccttctcctgatctgttggcctcctcagaggccctgtaaactctttgagggtcctgttaaagggcactgttttggggaagtactcctgggccctttgggtctcagttcagaaacctggttttggttgggcgcgatggctcacacctgtaatcctagcactttgagaggccgaagtgggtggatcatctgaggtcacgagtttgagaccagcctgggcaacacggcgaaatgctgtctctacaaaaagtacgaaaattagctgggcagccgggcacagtggcttacgcctgtaatcccaacgctttgggaggccaaggcgggtggatcacatgaggtcaggagttcaagaccagcttgactgatacggtgaaacccccatctgtactaaaaatacaaaaattagccggatgtggtggcgggcgcctgtagtcccagctactcaggaggctgagacaggacaactgcttgaacctgggaggtggaggttgcagtgagccgagatcatgccactgcactccagcctgggcaacagagcaagactctgtctcaaaaaaacaaaacaaaacaaaaaccaaaaggctgggcacagtggctcatgcctgtaatcccaacaatttgggagggtgaggcaggtggatcatgaggtcgggagttcgagaccagcctgaccaacatggtgaaaccccatctctactaaaactacaaaaattagccatgtgtggtggtgggcacctgtaatcccagctactcaggaggctgaggcaggagaatcgcttgaacctgggaggcagaggttgcagtgagccaagatcgcaccactgcgctccagcctaggcaacacagggactctgtctcaaaaaaaaaaaaaagaaaaaaattggccaggcgtggtggcaagcacctgtagtcccagctactcaagaggctgaggcacaagaatcacttgaacctgggaggtggaggttgcagtgagccgagatcatgccattgcactccagcgtgggtgactgagcaaaactcccatctcacaaaaaaaaaaaaaaaaaaaaaaaagaaaaagaaaattgggttttatttatttattttaatgtttttagaggtgggatcttgctacattgcccaggctggtcttcaactcctggcctcaaacaatcctcctgcctcaggctcccaaagttttgggattataggtgtgagccaccatgctggccaaatctggttttatttttatttatttattattatttttaaaaaatagagatgaggtctcactatgttgcccaggctgatctcgaactcctgggctcaagtgatcctcctacctcagcctcccaaagtgctagaattacaggcatgagccaccacgctgggcccaaatctggttttagaattctgatttgtgagggcttgtgcctgttcttgtcttgtctgtgtgtcagggggtggaatcctgaaggaatcactagcagaagctcaacaggcctcactcagagggaacctcttgtctgttttaccaggttaaaactcagatattgaggggaataactggtgtttgtgtctt[137 bp omitted]gcctctgcctccggggttcaaacaattgaaacagcctttgcaaaattatgactgagacagtgaaagagatctaacttaacttactccatcttgcttctaacttccaagctgtccttgttcattcccgggtgtaggctgaactaactttgggagaaacttagtttataatttaaacaaagatggtaacagccttttcccaaagcagacttccttcttgtctggggactagattgcctttgtaggactaacattagccacaagattagaaattatggtttaggagtcatgcagctggatgctacaagattctgacccttcctaaactgctcctaagatcagtgcttgacatattttgcagaccttgcacttgatagatcagctggcaccacccagatcaataaactggctcatctgatcttgtggtccccacccaggaactgactcagcacaagaagacagctttgactccctgtgatttcttccctgaccaattagcactcctggctcactggcttccctttactcaccaagttatccttaacaactcagttcctcgaatgctccacgagactgatttgagtaacaataaaactccggtctcctgcacagctggctctgcgtgaattactctttctctattgcaattcccctgtcttgatgaattggctctgtctaggcagcaggcaaggtgaaccccttgggtggttacactattctcatgcctcagcctcccaagtagctgggattacaggcatgcaccacctgtaccagtgtgtaccacctgtgcaccggcttttttttttttttttttttttgagacagtctcactgtgtcacccgggctagagtacagtggtgtgatctcggctcactgcaacctctgcctcctgggttcaagcgattctcctgcttcagcctccaaagtagctgggattacagatgtgcgccaccatgcctggctaatttttttgtattttagtagagacagggtttcatcatgttggccaggctggtctcaaactcctgacttcaagtgatccacccacctcggcctcccaaagtgctgggtttacaggctttagccaccctcagcaattcatcccaccagaacaaaaggctaacatagcaaactggtaaatttatctgcacagaaaaactgaactacaagggatgaggtacttaacttcccacctgaagacccaggaattttttttttttacttttcttcattgagatagggtctctatcgctcagacaggagtgcagtggcacaatattggctcattaagtctccatctgggatcaaatgattttcccacctcagtctcccgagtagctagcacaggtgcgtaccacatcagtctggcttatttttccacccttcctagaaacggtataaaatacttagcgagcatctaattaaaacagaccgtaacctaagaagacgtaaggtcataaccacaactccaaaaccaaacgcgcgccactacaacaactctgaaaataaacacacgcaacaacacacaagccgtcttttaaactagttcaatcacaggacagaaaagcgcaaaagcagtcccccactaccacaagttatgcagccgagttttctcattcggggaaatcgcgggagcaaacacatagtaaaaaccctcccccaagaaaaacactttatcaggaccaacagcgtctctcccccgccacaaagacattatttacttaatattgctaataccttaccatcgtcctcaacacacaacatactcatggcaaattgtattatgagttgtttttaggcatcgcttcgaaactaccgcttcttcgtatgacacatctcagactacaccttctttggtattcgctagaaaatttctcccgcgaagaacgcactagaaccggcaatcactgcgcccctatctacatatgcccgcctcttatagtaacgtcaccacctgcttctgtacgatctgactgaactcccttacggatcggttcgctctagctgccgctcccaaggattcaaaagaaatcgcattgtgtgataagaaattttttttcttttttctgcacaggctcatataatagaagtaacttttgttattttttcagagaattcatacagccattaattatccaaacctatttctcagtgcttttcaatggcgtgatctcggcttactgcaacctccgcctcccaggttcaagcaattcttctgcctcagcctcccgagtagctgggattacaagcgcctgccaccacacctggctaatttttgtagttttagtaaagatggggtttcaccatggtggtcaggctggtcttgaactcctgacctcaggtgatccgcccacctcggcctcccaaagtgctgggattacagacataagccaccgcgcctggccctcagtgctcttttcattccacttaagaaattggaacacaccaggatgaggatgatgatgccaaaactagattgatggctcacatcatctagggtaca[135 bp omitted]cctcatctcaaaatacaaaatattagctgggcgtggtggcgggcgcctgtaatcccagctactcgggaggctgaggcaggagaatctcttgaatccaggaggtggaggttgcagtgagccgagatcgcgccattgcactctaacctgggcgacaagtaaaaaactccatctcaaaaaaataaataaaataataataataatttaacactttattgaactcaaagcaacattaagcatctttgccttcgttttacacagctgtaggggagctcagggaggggaaggctgcatggttttccttggcggggaaggtgtgcaccctgcagtcctgcggtgttgtgggaagattagcccatgttctgtcggttgccgtagcccctagggtgggtgtccttccagtcatcccactctcgagctctttggagtgtttgttcatcatcctcttcctccttttcttgatcttcctgttgctgagtggcttttctgaattcttctggtgttgccttggctattccctgatctggtaacactccatgtttctgatgttgatcataccagtcactcactgtcatggaagccagacttggatagccagcgccaaatactttggcttgcgccatgttccgagtgagaatgaagggtttcattggaggcctcttctggtgacatgagttagaagtggatgcctctcttgaagagtctttctctcccaggatctttatttcctgatcaatgctctcaatctcttctaagctgatatcaatccacctctgaaggtgaagaagataatattcacgaacacgctcattatctgcttgaccactttccacagcagatttcattgtagacaacttatgctccaacaccttcttctgcttgtatcgctctattttagcctgtctttgagatgccatagcaacgaggctaggataagccgtggaggtaatagcaccgtgattttcagctgagttggtcttggtttggggcagctcaaactcggccacacgatagtaatggcactgagttaagtattttataaagtgttcgcgagcctgctgcaaatgatctagacgcttacgggggttgacttgtttcatggtgagggctccttgaaacgctggcaccatcaggtacttcaggtcggtggaagtaatctcctccaaatcttcatttcggctgaacaagtcaagctgcgataacattttggcaaccttgtcaaggaggtcgaggcccttgaacaccttttcctggactattcgggaaccggtgggttcagtcgctccttcgacttcgtccagaagctgtttgctggaatcgaacagctcggggagccgcggcggcggcaggaactcgtcttcagcagctgccatcttgggaaggctgatgcgaaatgttgattcctttcctttctggacacacgtaaagattctggcgtagatttctaacaaccagtctgaatcgggcgctgcacggcagggcagtcagggaggcggtggcgttgggggcggcataggggaaggcaacggagtcggttgtgccgggtctgaatcgctgctccactccgggtcttcgtcaaactttgtctctctgtttccgtttcctaaaattgtaaagtgggaataatactgccttcctggctcacaagatttctgtgaggactgaataagagaatgcatgtaaaaatgcagctacccccaacccaggctattctgcccctcgactgctgccccctgtactttgggacccccaaagtgactttgccaagattcaagtatctgcagttcctgccacacagggaagtagcatcaggcccggatttggtaacaaaccgagtgttcctgtatgtctatatctgtgtatgtatgatgtaaaaagtactgggattacaggcgtgagccaccacgcctggcctaaaactcagttttcaaaaattactgagtggccaggcgcggtggctcactcctgtaatcccccactttgggaggccgaggtgggcggactaggaggtcaggagaccgagaccatcctggctaacacggtgaaaccccatctctactagaaatacaaaaaattagctgggcgtggtggcgggtgcctgtaatcccagctactcaggaggctgaggcaggagaattgcttgtacataatacatattatgtgtgtacagatatatagcacacatatctcacacacacacacacacacacacacacacacacacacagaatcaaaccaactacatgaccaaattatgactaaatcaaagaccccaaataagttgagatggagaaacacagcccctcagtacagaatgttatttggagagttcccttacgtgtggggaagggcagcaacaggcacaactattaatctcagatcatggctgttcctgccaactcaggtgtgctgtcctaagacatgcccctcagtttgtgagtctcacctcatctctgaatttccaaccatcactttgcctcatgggagtcaaggaaggaagggttgatgctcagaaatatgagagtgacatatatactcaataatttttaaaagctgagttttgttacataagttcacaaagcagttgtgactgttaaaatgtcattaatgtgaccgggcgcggtggctcacgcttgtaatcccagcactttggaaggctgagacgggtggatcacaaggtcaggagatcgagaccatggtgaaaccccgtctctactaaaagcacaaaaaaattagccgggcgtggtggtgggcacctgtagtcccagccactcggagaggctgaggcaggagaacggtgtgaacccgggaggcagaggttgcagtgagccgagatggcaccactgcactccagcctgggtgacagagtgagactccgtctcaaaaaaaaaaaaaaagaaaagtcattaatgttggccaggcatggtggctcacacctgtaatcccagcacttttggaagccaaggcagatggatcacctgaggtcgggagttcaagaccatcctgactaacatggagaaaccctgtctctactaaaaatacaaaattagccggttgtggcggtgcatgcctgtaatcccagctacttgggaggctgaggcaggagaattgcttgaacgtgggaggcggaggttgcagtaagccgagatcacaccactgcactccagcctgggcaacaagagcaaaactccgtctcaaaaaaaaaaaaaaaaaagtcattaatgccaatgtaactgaatctaaattttttttttttttaagacagagtctcactctgtcactcaggctagagtgtagtgacatgatcttggctcacggcaacctccatctcttgggttcaagcaattctcctgcctcagcttcctgagtaactgggactacagggatgcaccaccacgcctggctaattttttgtgtttttggtagagatggggtttcaccatgttggccaggctggtcttgaactcctgacctcaggtgatctgcctgccttgacctcccgaagtgctgggattacaggcatgagccaatgtgccaggccactaaatgtcttactcaacaccctgagttgtggggagccaaatccattcactcctgaaacacactggccctgaagctgcatttctcagccacaaagctctgcaataaaaaccatactaactctatttaggccaggggcagtggctcatgcctgcaatcccatcactttgggaggccgaggtgctgatatcacctgagtttgggaaggtggaggctgtgttgtgccactgcactccagcctagtgagagtgagaccctgtcttaaccgctcccccagcaacaacaaaaaaacaacagcaaaaacccaactccacactatttagtacaattgctgatttaggacaattgctggattaccttcatccacaaagtgtgacccagcccacctcggttatactatataatctcattattgaactaccttcctaattttattccagaaggtttgatttcacatgaggaaagtaatactttggctttcaatggtatccatgaatgccaggctgaccacagctctgaggcctctatgattatttgtgccccctcatggctctgatatcacaggtactaacagaccctttttcctatgctgggagaactccatttctgatgaccacattgtctactccagtatttttgccattcatattcttgaatttctttgctgctaatgatgaaaaacacctgttctcaagtcattacttacatgtagcacatacttctcatttactgacagccacttaaatgttcaaggtccagtccgctggcctagccactggggatactaagaggaataatgcagagactgagtctgcctgcaataaataagatcatagtctgtagggaaaacagacttgccagacctataaaaagttcagcagggccacattacgattttgaagggcccatacttttgcctttgtgtgcctgcctcctctgataaaatatatacatttccattaaaatatatgttaaaaatgctatcttatgactgcattgattaaaagatgaatatattattatatatgacattttcttccacctaaaaattcatttttttcttctgatttttaaaagaagtgcccctaggcagtgtgcctgtggtacgtaacagataaggccaccctgggttcagtggcactgagtggatcccaggcagtttggaagggctgaagtataagttttccaggtagatgaagaagggcagggcagggaagtgcattccaggaagagcaggcatgtaagtttgtggaagtaatacagcaaggctctctggaaactttaaaataaggaaacagattaagttagagcactgcttgtccagtggaatatgatgtgggcaacattcgacatattcagttgaacatttttagtagctatattattatttttattattttatatttatagagatagggtctcgctatgctgcccagtctggtcttgagctcctggtctcaagccatcctcctgcctcagcctcccaaagtactgggattacaagcatgagtcatcaggcccggcccacatgaaattaactttattatcatgttttgcctgggtgcaatgactcatgcctgaaatcccagcactttgggaggctgaggcaggatggcttgaggccagcagttgaagatcagcctgaccaacttgcctaaaccctgcctctactaaaaatacagttagcttattgtggtcatgcgtggctgtagtccagctactctgaggctgaggcatgagaattgcttgaacctgggaggcggaggttgcagtgagccgagatcgcgccactgcactccagcctaggcaacagggtgagactctgtctcataaaaaacaaaaaacaaaaaaacccacaactcattgcgtttacctcactaaagttcctaagcattaaatgatagcaaggtacagctttaaacagtaagcaacggtaacaaccctgcaaccccaaagcattcttaagaaccaaaagaaacaatgaaaaaaaaaaataaggctgggcgcggtggctcacgcctataatcccagcactttgggaggccgaggagggtggatcacatgaggtcaggagttcaagaccggcctgaccaacgtagtgaaaactcgtctctactaaaaatacaaaaaactagccacgcgtggtggcgggtgcctgtattcccagctctactcaggaggctgaggcaggagaatcgcttcaacctaggaggcg[132 bp omitted]gtgtggatcacttgaggacaagagttcgagaccagccttgccaacatggtaagacgccatctctactaaaaatgcaaaaattagccaggcatggtggtgcatgcctgtaatgtaatcccagtttctagggaagctgagacacgagaatagctcgaactcgggaggtggaggctgcggtgagccgagattgctccactgcactccagcctggaaaatagagcaagactgtgtcccaaaaaaataaataaggcaaaacctaaaacaaccaaagaaggctgagcgcatgaattcggatgccactgcactccagcctagataaacaaagtgaaacaaaccttccacggcaaaaaaaaaaaaaaaaaaaaaaaaaaaaagcaaaagctaatacacaactaacaaaacttgcatttcaactaccacaaccagcagcaagtgcgaacgcaatctcccgctaccacaaattatacactgtagttacccacatttggggaaatcgtagggatcagcacaaagtgcaacgaataagccacacacagggaaaaaccacctccataatcacagtatttctcctgacaggtaattatgaggtacttgcgtgaccccagcaatccccggtgccgcccacatcattgcaagtgcgggtaactcctgaaatgactctaattggactttatccacatatagtgaacaaaataaacagattttttatactatatcttggtgttggtaacagagttgtgcaaatccttccaaggaacgcgtttccaaaatgcagtctttaatctacatactccacctcccggcgtgacgtcatgcataggcctggctggtcagagagcgcaactgcgttctcatctcggcccgcttccaaccagcagttccttctcctgctcgcgtcaatgcaagtgacgtctgtcaggccattttcctgacaaaaacgcaccacctcactacttttggcgtagcctaaggccttcggatctccctgtatggagagtttccttgagctaacagacgtgaatgaacttttagtcacgggatacccacgctgtgaaccaccccggcatcatttcctcttattccaagaaggggaacagggcatgctagcaggctgtactgcagagtggagggttttggaatccaagatctggactgcaatatagcgttcacaatgcaagactttcgatgagcttatggcctcaacttgttcctcagtttgtaaaacctgcattactgtccttggaggagtttttgtgaagactaaaacaaatacattaacgaacagcttaaaccttaaagcataattataacatgtgagtcaggcaacccaataaaaaccctaaagcaaaccaagaaatactaacagctaacatctactgtttaccatgcatctggactttatggttaatcctcacaacgttgaggtaggaaatggaatcatccccatttcatggataaagaacctgaggcatgacaaagattctttgctggccgggtgcagtggctcacgcctgtaatcccaacactttgggaggctgaggtgggcgaatcacttgaggtcaggagttcgagaccagcctggccaacatggtgaaaccctgtctctactaaaaatacaaaaattagccgggcatggtggcaagtgcctgtaatcccagctacttgggaggctgaggcaggagaactgcttgaacccgggaggcgaaggttgcagtgaggcaatgagccgtgatcatgccaccgcactccagcctgggcgacagagtgagactctggctaaaaaaaaaaaaaaaaaaagattcttttcttgtttgcttggccaaaccttattcaggcttctgaaccttctcataggccagtctgtgcatgttcttgtaaaatccagttttagtaaaggaaccctgctaagtcaatttagctgaaacccaaattctccaaatctgatcaggttcctcatcctgcaccaccccccaggtgatatctgatcaccccagcctgtcttcagcaagaatcctgttagatcagtttagccagaattcctcttacccctgatgtttcctcttggtaattttctaaccactgacctccacactgctccttggctacaaattcccatttgcccatgctgtactttggacttgtgcccagtctttctcctccactacaagaccccattgcagcggtctctatacctatcctgatggtcctgaacaaagtcatccttacagcaaaaaagtgcacctctcccagctaccaaagcctcttctactgatgtgcctggaggagctgcagtaactataaacccctgcaaatgtggaggaagtaactggagcctgggtccagtcatgactgtctactgaatcatcttagccaatgcccactgaaggctcagggtgctcccagcacagggagaagaacttcacacaccttaactcatttaatccactcaacaattctacagagtacacaatatctccattttgcatatgagaaaactgaggccaagggaggctgaaatgtgcccaagtggtagagaaggaattaaaatccatgtagtcatccccagagaggacttcttttttttatttttatgcacacacagacaagggtgacatctacagaaaataatctggatcacccagaaagcatgtggcatcctaggtgaactgctatgcgaggtaactggcccaagggctctagtcacccaccctaacatcctacccaaaggccctgaggactggggggtcaatatattacatcacacagtttgagaagctgtagggtggagacattctggcaagtgagtgtcatttgttccgggtatatatcaaattagaaaaaaaggctgagaaccactgttctaggtaggcataaaaaatggaacctggcaattatcaacactgtatgaatggaggattagggatacatctgtattgtgtaaaaaagggggagacaatgccaggcacagtggctcatgcctataatcccagcactttgggagggtgaggtgggcagatcacctgaggtcaggagttcaagaccagcctggccaacatggtgaaaccccatctctactaaaaatacaaaaattagccaggtatggtggtacacgcctctaattccagctactcaggaggctgaggcagaagaatggcttgaacccaggaggcagaggttgcagtgagccgagatcatgccactgcactccagcctgggcgaaagagcgacactctgtctcaaaaacaaacaaaaaaaaaaacaggagggggtgtggagaggagtttgtcatatttgctgaaagtcaccagacgatggctaaagaatgtaacaagccagctgctgggcgtggtggctcacgcctgtaatcctgacactttcggaggccgaggttaagtggatcatttgaggtcaggagttcgaaaccagcctgaccaaaatggtgaaaccccatgtctactaaaaatacaaaaattagccaggtgtggtggcgcatgcctgtaatcccagctactcaggaggctgaggcaggtgaatcacttgaacctgggaggcagaggttgcagggagctgagatcacgccactgcactctagactgggcaacagagagagactccgtctcaaaaaaaaaaaaaaaaaaaaaaagccagcaacagcttgagacttcattgaggtttagcaagaagcaccctcatgtgaatacatgttaacaaaatgtcaggaaggagcattggtgctgctctaatctaatgttactcccttgcccaaagcccttcaatactccttactgccctctggataaagcaccaactccatcccacgctccttgaggctctgcatgggctggctccatagcttttccagcctgcctgtactgtccaccataccgccgtggcagccacagctacagccgcagcctctttccagcctcagagcctttgcctgtgtagttccccttgcttaaaatgtttttaccctgcctctcctgacaaatctaacttctcttcccacgctgagctccctctgttatcatagtaagagtcctttaatttctcttttagtctttatcttcagtccattcattattccactgtgtgattatcagtcagtttcctgggctagactacagactgtcgaaggacctgagagttttcatctgtcactgctggagtctcaggctagcaaagtacctggcatggagatttctgcctatctatccatctatctataggatgtgtgtgtgtaatgattagaaagctaagaaatgtgatagaaaaggagtgtgagaagcctaaataaactttgggaagattaaaaaaaaaaacaacaaacagctttgggaaggtaagaataaggatcagggaccaagaaactaaattcagccaggagccgtggctcacgcttgtaatcccagcactttgggaggctgaagtgggtagatcacttgaggtcaggtgtttgagaccagcctggccaatatggagaaacccatctctactaaaaatacaaaaattagctgggtgtggtggcaggcacctgtaatcccagctacttgagaggctgaggcaggataattgcttgaacccgggaggtggaggttgcagtgagtcaagattgcgccactacactccagcctgggcgacagagtgagactccctcttaaaaaaaaaaaaaaaaaaaaaaaaaaaagtgactatacttaatatattcttgaaaattcctgaaagcatatgttaagcatctttaccacaataaaatgatagaagtacatacagtaatgcatatattaattagctccctgtagccattccacaatgtataatacttcaaaacaacgtgtacacaataaatatatacaattgggacactgattaccattacatgtccaaatattgcttccactccaccttctggaactctcattgcatttatcttgaccctctcattctattctctatctctttgaaactttcttgcattttcccatctctatatttctttgagctacatcctgggtaatttttcagatctgtcttcactaattctgtctttggcagtgtctgctgcttaacccattcactaagattattatttcaattattgtagtttcattttgagaaatgaatagactagagagggtttcttttgtttctgcctggtgctgggggacatcaccaagccaggctaaagtaactttttgtgccatcccctaacatatacacatagcagtatgaattctggcccattttgagggactgtgaatgtgagatagtggtgaagatttctctgccccttcccattctcaggctgaggctgagaccagcacatatctctaacatctttctcttggggagggggcattcctcagaactgagagtgttcttctcctggggtcgcagctttatagaatgaggagggactctctagtcagacctcccacccagctcaggccccaagctttgtctcctgcctgtggtccattaaaagccagccccagagcttctaaggatggccaatgtccttaggaaatagacagggtccatccctgcctttcctttctggatttgtttctttctctgggtctctgtggatttctctttttgctagatcagaaatatattttaaaaactcgttttcttgttctattttctcaccattttacatgttttgagcttacaaaagccttccctggacctcaggtctactcactgccagagaagctcatccctcaattcatctaatcctttagactttccacgccatttcactcactaggcccctagccccatctctcacctacttcatgctgcagcacagcgtatttcctctatcttagaggctcccaaactttttggcaccagggaccagtttcatggaagacaattttccatttctccacggataacagggggtgggtgggaatggtttcaggatgaaactgttccacctcagctcatcaggcattagttaggttctcataaggagtgtgcaacctagatccctggcatgctcagttcacaataggtttcacgctcctatgagaatctaatgtggctgctgatctaacaggaggaggtgctcaggcagtaatgacatcacctcctgctgtgcggcctagttcctaacaggccaccaactggtaccatgctccttccagggggttggaatcccctgctctaactggtcctagagccaatcaacagtcatctcctctactcccatttccccagcactgctggagaaaaaaagttgcagaatcttccagcactcttactccaaatactccaaatttatgcaaactgcaactacatcctcactgctacttggcattcctttttttgagacagagtctcgctctatcacccaggctgcagtgcagaggtgcaatctcagcttgctgcaacctctgcctcccaggttcaaatgattctcttgcctcagcctcccga[135 bp omitted]acaactgtgagccaccatacccagtcggcattcctttttttctttgtttgttttgagatggagtctcgctctgtcacccgggctggagtgcaatggtgtgatctcggcttactgcaacctttgcctcctgggttcaagcgattctcctgcttcagcctcctgagtagctgggattacagatgcgtgccaccatgcctgactaatttttgtatttttagtagagatggggtttctccatgttggccaggctggtcttgaactcctgacctcaagtgatctgctagcctcgaactcccaaagtgctgggattacaggcatgagccaccacgctcagccggcattccttttatacatactttttttaaaaaaaatttcttacaattgagtggttctccatgacagtggagccactcccaaagggaaattttgaaactctgaggggatgtttttgtttccctgggtagtcatgccaagcctttacatattaaaatattgtattgtagggcagggcgcggtagcttatgcctgtattcccagcactttggaaggccgaggtgggtggattataaggtcaggagttcaagaccagcctggccaatatggcgaaaccataaaaaaaaaataacaaatataaaaaattagccaggcgtagtggtgcacacctgtagtcccagctactcaggaggctgaggcaggaaaatcggttgaacccaggaggcaaaggttgcagtgagccgagatcacgccactgcactccagcctacacgacagagtgagactccatctcaaaaataaataaataaataaataaataaataaataaataattgtattgtaacttatttttctctctcctttatatttgtattgttttgtttttgagacagggtcttgttctgtaacccaggctggttggaatgcagtcacgcaatttcagctcactgcatcctcaacctcttgggctcaggtgatcctcccacctcaccctcccgagtagctgggaccacaggcatgcaccaccatgcccagctaattttttcaatcttttttttgtttttctacagttggggttaagccatgttgcccagcttggtctcaaacttcttggctcaggcgatcctcccaccctcccaaagtcctgggattatagacgtgagccaccccacgtggcttctctccttcatattatagttaggacatattatctgtggggtaactatatgtagtttatattttctacaaacatcttcaaggtagtaaatggaatgttactagttcttataaaaggaaaccctgggccgggtgcggtgtctcccacctgtaatcctggcactttgggaggccaaggcgggcagattgcctgagatcaggagttcaagaccagtctggccaacatggtgaaaccccatctctactaaaactacaaaaaatttagctgggtgtggtggcatgcgcctataatcccagctactcgggaggctaaggcaggggaattgcttgaaccagggaggtggaggttgcagtgagccgagatcgcaccactgcactccagcctgggcgacagagcaagactctgtctcaaaaaaaaaaaaggaaacccttgatttgacagaattgagaaccacaaactaatcctattgaacccacatccttttcacaggagtgagaataacttatttatgatgaaagtccggccaggcgcagtggctcacgcctgtaatcctagcactacaggaggccaaggtggacagatcacttgaggtcaggagttcacaaccagcctggccaacgtggcgaaaccccgtctctactaaaaatacaaaaattagctgagcatggtggctcaggcctgtaatcccagctactcgagacggagaggcacaagaatcgcttgaacctgggaggcggaggttgcagtgagccgagatcctgcccctgcactccagcctgggtgacagagtgagaatccatctcaaaaaacgaatagaaacactaagaagaaaacatagatgtaaatcttcctgacctccaattagggaatgatttcttacatatgacatcaaaagcacaagtatagtatgtcaattatccttcaataaagtggttaaaaaaaaaaaaagatttatcttcgatgaggcctttggaaaaaaaaaaaaaaaggcaggtaggccgggcacggtggctcacacctgtaatcccagcactgtgggaggctgagggggggtgcatcacttgaagccaggagtttgagaccagcctggccaacatgacgaaaccccatctctacaaaaaacacaaaaattagctgggcatggtagcacatgcctataaccccagcttcttgggaggctgaggcatgagaatcacttgagcctgggaggtggaagttgcagtgagctgacattgtgccattgcactccagcctggatgacacagggaaaccatctccaaaaaaaaaaaaagatgcaaatagccaataagcacacgaaaatatgttcaatattcttagccatcagggtaatacaaatcaaaatcaccatgaaataccacttcaccctcactatgattgctagaatcaaaatgacaagtatctggctatgggtgggcaaactagttgattttcccgaaaaaagctaaaactacaaagaagattgtgccaagccttgagtgtgttgagcccaactgcagaacaaagagaatgctgggtattaagagatgtaagcattttgaagtgagaggagatgagaagagaaagggccaaatgatatccagttctaagtgtcatcttttgttttataatgaagacaatacaatattggggttatgttcacataaaaaagtctccagacaatctctggctctttctaaaaatcaaactatcttttaaatgggtgaattgtatggtataatattaacagatggtttccccatctcccttccccagacagactcctgattatgacaaggactatgttccaagggtatctgcattcccctcacccagaataagctttgtttacaataagtaccccattatatattggctgaattgaatgaactggaaatcaaactcaggaagcatttccaaaaggatttcctttaaacatgtttttaatttttagagacaggttcttgttctgtcgcctgggcctccaaaggtacggtgattacaagcacgagccactgagtctggactttttgcatttttaaattgatatatcatagtagtatgtaagcttttccctttttaaaactactatgggccaggtgccgtggctcacacatgtatatcccagcacgttgggaggctgaggttaatggatcacctgaagtcacgagttcgagaccagcctgaccaacatggtgaaaccctctctactaaaacataaaaattagtcggccaggtgcagttgctcacgcctgtgatcccagcactttggaaggctgacgcaggcagatcacctgagatcaggagttcaagcccagcctggccaaaatggtgaaaccccatctctactaaaaataagaaaattagccaggcgtggtggcaggtgcctgtaatcccagctactcaggaggttgaggcaggagaatcacttgaaccctgggggcagaggttgcagtaagccaagatcacagcattgcactccagcttgggcaacaagagagaaaatccatctcaaaaaaaaccaaaaaaacaaaaaaaaacacaaaaaaacccaggcgtggtggcaggcgtctgtaatctcagctactcgggaggctgaggcaagagaatcacttgaacctgggaggcagaggttgcagtgagccaagatcatgccattgcactccagactgagcaataagagtgaaactccatctcaaacaaaagaaaacaaaacaaaacaaaaccaacaaactactatgtcagaacctaaaggtgatcattcaaagtagtcattttagaatgcaatgaatgaatttcaattctatagtcattgttaagagcaggttaaaatcctttaggggccaggtatggtactcatttttgtaatcccagcaccttgagaggccgaggtgggaggatcacttgaggccaagagttcgagaccagcctgggcaacatagcgagaccctatgctacaaaaagttcttttaaaattagccagctgaccaggtggggtggctcacgcctgtaatcccagtactttgggaggacgaggcaggcagatcacctgaggccagtctggccagcatggcgaaaccccgtctctactaaaaaatacaaaaaagtagccaggtgttgtggcgggtgcctgtaatcccagctactcaggaggctgaggcaggagaatcgcttgaactcaggaggtggagggtgctgggagccgagatcaaaccattgcactccagcctgggcaacaagagggaaactccgtctcaaaaaaaaaaaaaaaaaaaaaattagccagccgtggtggcacatgcctgtacagctacttggaaggctgaggcagaaggactgagtccaggaggtcaaggctgctttgagccatgattgagcaccactgtactccagtctgggagacaagagcaagaccctgtctctaaaaataaaaatgcttaaaggaaatccttcctgagtttgatttccagttcatttgactcagccaacatatatgtggtactcattgtgtacaaagtttatgctggattaagggaacacagccaagaaaaaacaccaaggaagcctgttactatcacaaactaaatagtagtacagcttctcacttccatggaaatttaaagacacagttcacaagaaacaagcaaggagaagccaaacacggccacagacaatcacattggctacttcccatttgacaaagaataacacaggggaaagtgtgaacacagtcgcccactaccacaaattatgcagttgagtatcccacatttggggaaatcacaggggccagcaaacacagaatgcaatgagtgaaccttgccctgggaaaaccacctttgtggtcagggtatcttccctgcccggtaaagtggaaggcatggttgttgcctgacatctcaccctcagattcaaaacactcttcacatagggtcactcttcttgcacaagttctagcctgctacttacaagataaagacttttccaaagtttaagagccagaaatggctgggcacggtggctcacgcctgtaatcccaacactttgggaggccaaggcaggcagatcacgaggtcaggagttcaagaccagcctggccaacatggtgaaaccccatctctactaaaaatacaaaaattagcctggcatggtggcgggtgcctgtaagcccagctattcgggaggctgaggca[137 bp omitted]atgaaaagcttatccagatgggcctaatgtaatcacagggtccttaagggaaggacactggaagacagtgtggcgattcctcaaggatctagaactagaaataccatttgatccagcaatcccattactgggtatatacccaaaggattataaatcatgctactataaagacacatgcacgtgtatgcttattgcagcactattcacaatagcaaagacttggaaccaacccaaatgtccatcaatgatagaatggattaagaaaacgtggcacatatacaccacggaacactatgcagccataaaaaaggatgagttcatgtcctttgtagggacatggatgaagctggaaaccatcattctgagcaaactttgcaaggacagaaaaccaaacaccgtatgttctcactcataggtgggaattgaacaatgagaacacttgaacacggggtggggaacatcatacaccagggtctgtcataggatgggggaaacggggagggatagcattaggagacatacctaatgtaaatgacgagttaatgggtgcagcaaaccaacatggcacatgtatacatatgtaacaaacctgcacgttgtgcacatgtaccctagaacttaaagtataataataataataataataata[210 bp omitted]ctgaggcaggagaatcccttgaacccttgaggctgaggttgctgtgagctgagattgcgccattgtactccagcctgggctacaagagcgaaacgccgtctccaagaaaagaaaaaaaacagaaggactctggaggtccacaaaaagatataaagacagaagaaaagtcagaagatgctaaattgttagctttgaaaaggaaagggctacaaacaaggaaaatgtgaaggtaacactcccttagagccgccaaaggtattcaactgcgtacttctgattgtaatggcaaatcactgtagtactcaatgacaacaccaaccacgaggggtgtgagaccaaaagcgtgtgtggagaaaaaaatgaccattagaaggcatcaatctctcgctattccaaaacaggaggttacaatataacacaggaaaacctacgaagcaaagatacaacgtacgccttttataaacaagccagatcaggggagagaaccaacatagtccccactaccacaaattatgcaattaagtttcccacatttgtagaaaaccacaggggtcagcacatccacaatgcaagagacaaacctcaccctgaaaaatccacctttaatgatcatgttatttcccttgccagttaagtatgagtccccagcgctgcctgagagttcacccttagattcaaaccactctaaatataggatcatttttctcatgtgctctttagaccccctaatttctggaataaagatattttccaaactacaataacccagcacctgtatttttaatatctggctattcaaaatcttaagaaatataagcctagggtgcaaatagccagcagtcactgcgcttatctacatactccacacccctttggatgatctcattcagtatgtcctttcctagtatgcttggtgacacgactgaaataaaacttaaaaatgctctacagattaaaaggtaaataacgtaaactagctcctgcctttaagggtttggcactaatgatgccactatggtgtcttttttctttttttttccccccagagacaaagtcttgctttgttgcccaggctggggtacagtagttatcgaacttctggcctcaggggattttcctgtttcagtcttccccagcagctgcaaaaacaggcgcgcacggctttcttgcgcagttaaacaagctgctatacacgtaacctgagtaagtttgaaaacatgaaatttggtaaaattatttctgaaaatccagtctacatatctgaaaatccaatctctgtataggttacctaccagtccaaagtgtcatgcttacatacaaaatgctgtctttcaaacatgcagcaaatgatcaatcttacttgaaagatcaattgcacaaacgctaattctaattttgaatgaagcaggccggacgctgtgactcctgcctgtaatcccagccctttgggaggccaatgcgggcagatcacttgaggtcaggaattcgagaccagcctggccaacatggtaaaaccctatctctaataaaaatacaaaaatcagctgggcatggtggcaggcacctgtaatcccagctactcaagaggcaggagaacctcttgaacctaggagatggaggttgcaatgagctgagatcacgccgctgcactctagcctgggcgacagagcaagactctgtctcaaaaaaaccccacaaaaaccaaaaaaacaaattagaattggagtttcagagttaacagtgttcttcaattgtctttccaagatcacactagaaccaccctaatatcccacatcttttattttacagaaggactcttctggtatcttctcttctgccaaaataaattagccagagtttataacttttttttccttgtcactgacttcaagctcacggttttccatctttacaaaaggaagaaataatgctgttttaaaaatcttgggccaggtgcagtggctcacacctgtaatcccagcactttgggaggctgaggtgggtggatcacctgaggtcaggagttcaagaccagcctggccaacatggcgaaaccctctctactaaaaataaattagccgggcatgctggtgggcacctgggtactcgggaggctgagacaggagaatcgcctgaacccaggctgcagtgagccgagactgtgccattgcactccagcctgagcaacaagatcgaaactccatctctaatgataaataaataaaaatgaaaataaaaatcttgctaaacaagcaacaactgagaacatagaggtgtcttagatggggagaaaaagaatattgggacaaggaggtaggggattctgtgatgcaaccagacacttgttctcaagtctgatgttctgacagtctatcagttttatttttatatactttccttttcaaagaagtattatgtaatatatatatacatacacacatatgtatatgtatgctctataaattgtcaacattttgttttgtgaaataaaacacactttgaaatctggttggagggctggtcgcagtggctcacacctgtaatcccagtactgtgggaggccgaggcaggtggatcatttgaggccaggagttcgagaccagcctggcaaacatggtgaaaccttgtctctactaaaaatacaaaaatatctggtggtgtgcatctgtaatcccagctacccaggaggctgatgaaggagaatcgcttgaacctgaaaggcagaggttgcagtgagctaagatcatgccattgcactccagcctgggtgacagcaggaaactcttgtctcaaacaaaaaaacaaaaaaaaagaaaagaaaaaagaaatctggtggaacaactcatgtaagggaaaaggtaatgtatgtgaactatactgccattaccaccaaacaattcttacaaccaaaatgccagtttcagaagatttgtgactagcagtgccttcttcaggctagagtgcagtggcaccatcacagctcactgcagccttgacccccaggggtcaagtgagcctcctgagtagctgggactacaggcacacactaccatgtctggctaacttttgtattttttgtagagagggagtttcaccatgttgcccaggctgggctcaaactcctgggctcaagcaattgacccgtctccgcctcccagacagttgggattagaggcatggaaccaccatgcccaggccacagagtctttctttttttttttttgtgacagagtcttactctgtcgtccaggctagagtgcagtggtgccatctcagctcactgccacatctgcctcccaggttcaagcggttctcctgcctcagcctcctgagtagctggaattacaagcacatgccaccatgcccggctagtttttgtatttttagtagagatgggtttttgccatgttggcgaggctggtctcgaactcctgaccccaaatgatccacctgcctcaacctcccaaagtactgggattacaggtgtgagccaccacgaccactcctccaaccagatttcaaagtgtgttttatttcacaaaacaaaatgttgataatttacaggcccacctcagcttcccaaagtgctgggattataggcgtgagccaccatgcccggctgcccagcctacagagtcttaagtggctcatgaatcctcacaagtcccagtttcaatgtttcacaaaaatttcattgctattggcctagttatcaaaatatctgttcaagggagtcagccttaggcaaaaagatgtctgtcctccactgccttgtaactctaagcaagttaagaaaaatgttactgttataatcctcacagaggtcctgcataccttaatatcctttgagaagagcctcatttctttgattagaaaaaaatgaggagctggatgcggtggctaacacctacaatcccagcactttgagaggccaaggttgcaatgtgtcgagatcgcgccattgcactccagcctgggcgacagtgcgagagtctgtctcaaaaaaaaaaaaaaaaaaaaaagacaaaaatgaggaaaggctgagcacggtggctcacgcctgtaatcccagcagtttgggaggctgaggcgggtgaatcacttgaggtcaagagttcaagaccagcctgggcaacatagcaaaaccccatctctactaaagatacaaaaattagctgggcatggtggcacgtgtctgtaatcccagctactccggaggctgaggcaggagaattgctcgaacctgggaggcggaggttgcagtgagctgagatcacaccactgcactccagcctgagtgacaaagcaagactccatccccccccccaaaaaaaaaaggaaatatatgtttgttaaatactaacataagtaaacatataaaatctttataaactgaatctagtagattatttaaaaagagacagaattggccaggtgcggtggtttacgcctgtaatcccagcactttgggaggctgaggcaggcggataacctgaggtcaggagttcaagaccagcctggtcaacatggtgaaaacctgtctctactaaaaatacaaaaattagccaggcatagtggctcacgcccgtaatcccagctactcgggaggctgagg[132 bp omitted]ttcccgcctgtaatcccagcactttgggaggctgaggcgggcggatcacaaggtcaagatatcaagactatcctggccaacatgatgaaaccccatctctactaaaaatacaaaaattagctgggcgtggtggtgcatccctgtcatcccagctactcgggaggctgaggcagaagaactgcttgaacccgagagacggaggttgcagtgagccgagatggtgccactgcactccagcctggctacagagcgataggacctacatatataaaagtatacgataaaggtaacatttcatatagaaggggaaggaactgattatttcaaagactgctcagaaaattaggtcacaactggaaagaaaaaaaaatgcttccgcccggcatggtgactcacgtgagcctataatcccagcactttgggaggccttggcgggtggatcacctgaggtcaggagcatgagaccagcctgaccaatatgatgaaaccccatctctactaaaaatacaaaaattagtgaggcatggtggtgggtgcctgtaatcccagctatctgggaggctgatacaggagaatcgcttgaacacgggaggcggaggttggagtgagctgagatcacaccattgcactccagcctgggcaacaagagcgaaactccgtcccaaaaaaaaaaaaaattgcttccatattagccgggcatggtgacacgtgcctgttcccagctactctggaggctgaggcaggagaatcacttgaaccagggaggcagtggtggcagtgagaagatcgtgccactgcactccagcctgggcgacagtgagaccctgtctcaaataaataaataaataaataaataaataaataaataaataaataaataaaaagctttcttcctcctaccacttattttttaaaaactcatatagattaatagggaggcagaggtgggcagatcacctgaggtcaggagttcgagatcagcctggccaatatggcaaaaccctgtctccactaaaaaatacaaaaattagctgggcgtggtgtctcacacctgtaatctcagctactcaagaggctgtggcataagaattgcttgaaccctcaagacagaggttgcagcaagcagaaatcatgcctaggtgacagagcaaaactcagtcccccaaaaaatcatataaatagtcaaatgttgaaggaatggatggttagaaaataaaattaaaaattaaaaaagattcaaatgtagatctaaaccatatgtagaaataatacgaatgaaaaatccatttataattttgtatagaccttctaaacatgttaccaaagtcagaatacaaaaattgaatacattagatttggcctagttttgaaggacctgttttgaagcacgttgggaggccgaggtgggtggatcacctgaggtcaggagttcaagatcagcctggccaacatggtgaaacaccgtctctactaaaaaaatacaaaaattagctgagtgtggtggtgcacacctgtaatcccagctactcaggaggctgaggcaggacaatcgcttgaacgtgggaggtggaggttgcagtgagccgagatcacaccaccgcactccagcctgggcagcagagtaagactcggtgtcaaaaaaaaaaaaaaagaatgtcagatttgacagataaatagtagttaattaggtgaaggagggagaggtaatattatagacatatgcaaacactgttgagggatgaggtctagcacacacaaggaactaagaaaaggccaaagtagcaggagtataggaagcaaatgggaaagaggaaaaggaagaaggtaaagaggaaaaacaggggccaaaacatgcaagctttttttaagccttattaagaaatttggtctttatcctaagagcaaaataaggcgaggtgcggtgcctcatgcctgtaatcccagcagtttgggaggctgaggtgggtggatcacctgaggtcaggagttcaagatcagcctggccaacatggtgaaacaccatctctactaaaaaaaatacaaaaattagctgggtgtggtggtgtgcacctgtaatcccagctactcaggaggttgaggcaggacaatcgcctgaacatgggaggtggaggttgcagtgagccgagatcacaccaccgcactccagcctgggcgacagggcaagactctgtctcacaaaaaaaaaaaaaaaaaaaagatcaaaataaggagtgacataactgaaatgtactgtaaaaagatcatgccaggaggatcatggtggctcgcacctgtaatcccagaactttgggaggccgaggagtccttgtgaccaggagttcaaaaccagtctgggcaacaccttgtctttacaaaaatttttaaaaattagctaggcacggtggcatgtgcctgttagtctcagcttcttaggaggcaaaggcagaaggatctctttcttgagcccaggagttcaaggttgcagtgagatatgattatgcagagtgaaagggaaggaggtgtcaaggatgattctaggtttatggcttatgcaaatggaaggatggatatgtggttcatggaggcaggaaatgcaggaagagggcaaggttctgggaatggggtgaaggtaatgagttaggctgagttggaggagactttgaattgtccagtaggcaattagatatttgcatctggacggcagagggtcagggctagaaatacaaatttgagagtcactgccatgcccaggttatggaggatgtgcttgcaaagcaaacagaaaagccaaatatgtagaaaggaaatcagaagtgtggcattaaaaaagccaagtaagagaatgtttcaaagagtcgtggacaacaaatacatattgggcttctattatgtataaggtcctgtaaaattgatactgctagtatatatgtctgaggccttaaagaagctttatcataaccacctctaaagctatgcctttattcagaggtttttctcctcagtctgaacaacattgacttctttctcctattcccaaacccacttgaacatgaaaggtcaccttttttttttttttttttttttttttttttgagatgcagtctcgctcaatcacccaccctagagcgcaggggagggatctcagctcacagcaacctccatctttggggttcaggagattctcctgcctcagtctcccgagtagctgggattacagatgcccaccaccacacctgtagggagctgaaggcccatgggatgtgaccaactcagcattccactggaggctctatgatcaaacaccaaactgttaatcatgaatgcaggatgtgagcaaactcacgactgctcctgctgacagaagatttgctggaggcaatcactccctggcactgaggttatccactgcgacatctagagaatgcggtcttgcaagcctactctggactcagcagctgaccccttctcccacctcccttctcactatctcttttacctaataaatacagaaggctgtgtaaagctcagggcccttgtccactagaggcaaggtaccccctgaccccttcttccaaatatactcttttgtctcgtcttttattcccgcatttgccctcctttgttcagcccataggtccgtgcgggttacagagtggtgccctgatcagcaacagaatcgggtgctctacccacacctgcctaagttttgtatttttaatagagacagggtttcaccatgttggccaggctggtcttgaactcatctcaagtgatccacccacctaagcctcccaaaatgctgggattacaggtgtgagccactgcacccggccgtggtcaccattttttaaagttctatgttcttaggctaaaaaaaaaataaacttctccccagctataacaaaaatttcatattattcctctcctatgtctccagaaacagcctagtcaacctgaaaatgtctcgttattggaatactctgacaggttaactatagacattaacagcaataggtccttcctacccttagaattacatcaagatagctacacaagtcagaaatgcaacatgtcagaaatactcaataaagatcctgatagattataagctccatgagggcagagaatctatcttgtttaccctgtcatctggcacataactagcatttaatcaatatttaatcttgttttagtgatctagtcttcagagtgctaatcctgaatgtagaccccagtcataggattactgtggatcaagtcaaagaaaataaaatatataaaagtactctacttcggcacttttacaattatagactttttttgttttgttttgtttttgagactgagttttcctcttgtcgcccaggctggagtacagtgtcataatatcggctcactgcaatctctgcctcccatgttccagcaattctcctgcctcagccttccaaatagctgggactataggtaccctccaccacccccagttaattttgtatttttagtagagacggggttttaccacatcgcccaggctggtcttgaactcctgacctcaagtgatctgccagcctcagcctcctaaagtgatgggattacaggtgtgagccacagtgtctggcctaattgtaaacatttttaaaaaacgtctcagcattagcattctgctgagctaggtattctataaggatttattccaactgaatatgcgcattagaatgctgtaaaaactgagaaacagactcagatttattatgtacttttttgtgtgataagtactgtatatgtgttaatttaatcttgaccaaaaccccaggagatattatcttctacttgcaggtgaggagactgagtaacttgctgaaggtcacatagttggtaacttccagacatgtgatacaaatccaaatctgtgtgactccgcagcccatgctggtttgcccatagcaatgtctctcaaattttttcatgaagtaacctcaagttgcaagaaaaaccaaaacatattcccggggggggtttgggagattactgaagtatccagtttaagcctgatgtgtctctgacctcatacttttctcttaaattttatttttatatttgcattttacccccacattttgtttttatttctatacatatatttttttttg[132 bp omitted]caccacacccggctaattttttgtatttttagtagagatggggtttcaccgtgttagccaggatagtctatctcctgatctcgtgatccgcccacctcggcctcccaaagtgctgtgaaacaggcgtgagacatcacgctcagctaatttatttatttttagagggagtctctctctgtttccaggctagagtgcagtggcctgatctcactcactgcaacctctgcctcctgggttcaagctattctcctgcctcagcctcctaagtagctgggactataggcacacatcaacatgcccagctaatttttgtgtttttagtagagacagggtttcgtcatgttggccaggatggtcttgatctcttgacctcatgatccacccgccttggcctcccaaagtgctaggattacaggagtgagccaccgtgcccggcctaccccatgttttattaaagtttattttctttttcaaaaattttaatgatttatccacactacacagatgtaatgtctgcttaatataaaccatttcaaatgacttaggtaaatcatttaactcttccctccctgaaagattttttttgagaaaagtgattacacaagaaggtgcaccttccatatttatcccatagctttgtttagttcctagtgcgtggtttcaaaaacctggatcccagtttgaaagcatgactacagagcaaattgcattaaagacatcttaagaatgatgatgaaaataattattataggcaagggccagaagattttttttttttttttttctgagatggagtctcgctctgtcgcccaggctggaatgtggtggcgtgatctaggctcactgcaagctccgcctcctgggttcatgcaattctcctgcctc[132 bp omitted]atattaatagcacttaaattatacagctatagatagagttgagtgggggtttttttgttttttttattttgctttgttttgtttttgagatggagtctcgctctgtcgcccagattggagtggagttacgcaatctcagctcactgcaacctcaacctcccgggctcaattggttctcccacctcagcctcccaagtagctgggactagaggcatgtaccaccatgctggctaatttttgtattttttgtagagatggggttttgccctgttgcccaggctggtctcaaactcctgagatcaagcgatgtgccctctttggcctcccaaagtgcttggattccaggcttaagccactgtgccaggccaaagtagttttgaactttccactgtcaacgaaagaaattctaaacacgactgattccactgagtttgaccaaactaactgaagacttattgttgaatgtggtaataccatgttttttcttcacccaagaatctgggtgctttataagcataagcatgaaatctccctgaagatagtatttatgcatccactgagcgctcaaatatagaccatattagaagttaagcaatgggttgagtggccaaccacattttggccagtcctacaagactttctttgacctaccaaatggggtataaatgcttctcgtattctccccgccagtagggactcaaaatcttaatagctcggggtagtaaaaaggatgctaggtttgaatcttggctttaagaaaactgtgctgaggtgttttgtttgtttgagacagggtttcactctatcacccaagctggagtgcagtggcgtgatcatagctcactcccaggctgaagggatcctcccaccacagacttctgagtagctgggacgaccggtgcatgccaccatgcccggctaattttttgtacttttggtacagacagtgtttcgccatgttgtcgaggctggtctcaaactcatgagctcaaagagatccacctgcctcgacctcccaaagtgctgggattacaggcacgagccactgcgcccggccagctttttttcttttatcagaattgatattaaactatatgctgagcttccatgtccttatcttccttttggcatggctatggccatttgaaatgtgtgggatttgctaaagtgctcaacatacgttgtttccttttttagatctaagtatgtagagggctctgatttgcaatatttagaaagttcttctaagctgggaagaaaagtcaagactaagaatcattgccaacagggccgggcgcggtggctcacgcctgtactcccagcattttgggaggccgaggcaggcggatcacgaggtcaggagttcgagaccagcctggccaatatggtgaaaccccttctctaataataatacaaaaattagccgggcatggtggcgtgcgcctgtaatcccaggtactcaagaggctgaggcaggagactcacttgaacccgggaggcgaagg[132 bp omitted]cctaggcaaggaaggaactcataaaccaccttctaaactgcttgccttcctccccgaagttctgtaatttagaggcggtcactaccactgcttgaacaccccttcccaagtctgtaccacaaaaggagctcttgtgtagcccagcccctccttctcaggaccccaggagcccagacacactaatggggacattagttgcttacttttccagctactgcttaagctaggcaggccatgaagaaataacggtctcagtaacctccatgctcgggatacgactcccgggaagacgtgggtgggtgcggggaatgcggactgatccctcccagcggccgttgggggctggcccacaatccctcgcgagggcgggaaaagcaatgtggtcgttgcggggggggggggtcagaaaagggggacggtcagcgggaagagccaagagactgcaactctacaaagagcacgcagattaattctaatgattgttccctgagcttttcacaccaaaataatggtaactggctagtgtgtgcccgttacgctcactactcccactcgagatcattcctattaatgactctgaggcttcacctaacaggccacggtggaggcaaggaaatgtggcgtggagaacccactgggcctggctctccgtcctatggtctccgtccatcgttttacagtcagggtgtacatttgatgaggaatctctaaatgggattttggggaatcaaaacggaatggtgcataagtgtgaaaatttacaagactgcgcaaagctgcaaggcccggagccccgtgcggccaggccgcagagccggccccttccgctttacgtctgacgtcacgccgcacgccccagcgagggcgtgcggagtttggctgctccggggttagcaggtgagcctgcgatgcgcgggaagacgttccgctttgaaatgcagcgggatttggtgagtttcccgctgtctccagcggtgcgggtgaagctggtgtctgcggggttccagactgctgaggaactcctagaggtgaaaccctccgagcttagcaaaggtaacgactcctgatggcaagctgaggcacaccggccgccgtcagcgccgcctcagtcttcgttctctcgcctcggccttcagcccagtctccgttagattctgcttcctcccacgtccatgtttacagcgtgaaagagctcctcgactccacttacaagttgtctgaatggttaggagaactgtggtcgtgaaaacatttactaattgcttttcctctggcaatgcctgctgaatgctttgaggattgtctcatttaaccctcaacccgcttacgtagattattatattcagtatatggatgagagaactgatatcttggggagcttaggtaacttttcatgctaactgggttaggaaatactggagtcagaattggttgtctaatttttgctgttccaagatccaaggggtaagggttaaatttcagaaatgcaggattttgtgtaggactagagacactaagaatgagaaagagagtagaatccccggaatcttgaggaagcatagaaagaatattctcttacgtaattaactgaaacacccaaaacctcatattccagagcattgcagatgggaaccactgcatcctgagacatacaaatatgaggctggcggtggtcacttgttgtgcacatctctctatgacatgtctggacctgtgctattcactgaagaagatggaacagaattttaagttactgcccttactgatggaaaatacagaggtttcaattcgcctctaaagaataagtctcgtggacccagccttaactgtttaagtcataccgcgcgcagactgtgtcccccaagatttgatgggctcttttttcttcaacaagttggcttttcaaagaagaaatgtgagaccctgaataataatgatcactaacaactattgactactttagatggtcttgatattctaccaagctttttacatgtatcgtctcattcccattttatagacgaaaaaaatctgagcaaaaaagaaaaagtgaagtaacttgcccaaagtcatgcagtaagtggtgccaggatttacaaacccaggcaatctaattccagcattcaggctcttgataggattttcatttcctaaatgctgtcatcaccattgtcttttattagccccatatttatggctcatattcttatcagatcaagcactgatatatcaaactgataagtgatgtcatcctcaccattatttcttcaccagcttgttttgtaattgccattttcttttctcaggccacactgtcagatgggtgaaattgtgtagtcgaggaagcataaatgtattctttaaaatgcttgtgccttgaataattgttctcattagtttggagtgatacatgaattttttacatcagttatttccatgaaaagtttttattataaataatacatgcatatgtgcttcttaaagttgtaccttgttttaggcagttaaaacatctattttcattctcatctgaaaaataatttgtataccttatgagagcgagataattatggcttcataagaccaaaagggatagtaaaaatatggtaatagtgagtacatttttatttctgcttcctgagacacttgtaggtactcagaaatgctttagttgaattgtttctgaggtaataggtaattctttatgtgatgactaagaaaacgaatacctttattaagctgaatttttttttttttttttttgagacggagtctcgcactgtcatccaggctggaatgcagtggtgcgatccaggctggagtgcagtggtgcaggttcaagtgattgtcctgcctcagcctcccaagtagctggaattataacgcgtgccaccatgcccggctaatttttgtatttttagtagagacggagtttcaccatgttggccaggctggtcttcaactcctgacctcaggtgatctggctgcctcagcctcccaaagtactgggattttaggcatgagccactgtgtccggccaaactgaaaaattaaatggttgatagaatgttgcatttttatgtttctccactcctagcatcactgttgtctacaaattaataaagacaatcgattatcatgttacacttttaaatctctaaaattagggttctttttttcttattttactttcagaagttgggatatctaaagcagaagccttagaaactctgcaaattatcagaagagaatgtctcacaaataaaccaagatatgctggtacatctgagtcacacaagaagtgtacagcactggaacttcttgagcaggagcatacccagggcttcataatcaccttctgttcagcactagatgatattcttgggggtggagtgcccttaatgaaaacaacagaaatttgtggtgcaccaggtgttggaaaaacacaattatggtaaaataaagtgttctccttttaagggtgggtttaataacatattatgaaagtagtattttgtactatcgtcaggaaaccaaataagatatatatgtgctcttaattttaagtgtgtatgtgcattaaacaaaaattagcttactatttgtgttacttcattatcccttcttgataaatgtatgcaattattctgatgtgaaaaagtgtttcttttgcaaattgtactgcagtcataaggttaaacaggaagtttctgcgttattcattcctgagactatatttgaaagtcagatgtttgaaagtagatttatggctaggggtagtggctcatgcctataatcccagcactttgggaggccgaggcaggaggattgcttgagcccaggagtttgaggcctgcctgggcaacatagtgagacctcgtctctactaaaaatggaaaattagctgagtgtggtggcacatgcctgtggtcctagctacttgggaggctgaggcaggaggatagcttgagccggggaggtcaaaactgcagtgagccttaatcacatcactgggcagcagagtgagaccctatctcaaaaaaaaaagaggccggggatggtggctcacacctgtaatcccagcactttgggaggctgaggcgggtggatcacctgagatcaggagttcaagaccagcctagtcaacatggcgaaaccccatctctactaaaaataaaaaaattagccaggcatggtggttcacgcctatagtctcagctcctcgggaggctgaggcaggagaatcgcttgtacttgggaggtggaggttgcagtgagccgagatcatgccactgcactccagcttgggtgacagagcaagactctgtctcaaaagaaaaaaaaaaaaggtagatttatgtataataaggggctccattttgagaggcctggaaatgattaaaatattcttaattggctgggcgcagtg[131 bp omitted]ggtggcgggtgcttgtagtcctagctactcgggcagctgaggcagg[135 bp omitted]ataggcatgccctccccgaatccagttgatttacatatagtcgattggttcacattatatctggagtcatgaagagttagacatttctgttgccttggggagtatatttacatttataaaactttagtgatacctaacttgtcattatctggagttcaaaaacactaccttagatcatcatcatgatttggttgtttgtcatctttctgttgacagtatgcagttggcagtagatgtgcagataccagaatgttttggaggagtggcaggtgaagcagtttttattgatacagagggaagttttatggttgatagagtggtagaccttgctactgcctgcattcagcaccttcagcttatagcagaaaaacacaagggagagggtaagttagtaaatgatcttctttttttctgtattaataaaagtaatttgcatttgtgcccatctgagacctcagcaacactccatttggaatgtgaagcctaattactggacagttaactagtgttaaactcttttactactgttacaaaatgagaaatgccacagcctggactggcttttttttgttccccttttatggccctcacttcttcctgtaggagctttgggacaaaacctatgtatgtatttcagtcatcatactccatcttatcaggtgtaagttaacggtgccggacaccttaatataagcaactgttgttaaatgctttccaatgtataaggacttccatattggttttccaaaaaccaaaggtagctttgaaaaccacgtctgaggccggatgcagtgctcatgcctgtaatcccagccctttgggaggccaaggcgggtggatcacgaggtcaggagttcaagaccagcctggccaacatgatgaaaccctatctgtactaaaaataccaaaattagccaggtgtgatggcacatgcctgtaatctcagctactaaggaggctgaggcaggagaatcacttgaactcaggagttggagattgcagtgagcccagattacgccactgcactccagcctaggcaacagagtgagactactctgtctcttaaaaaaaaaaaaaaaaaccaaaaaaaaaaaccacgtctgaaatgtttggattgttaagcagattgacttgggggctttgattatatagctgatttcataactgcactaattgttaaagtgtttgggaggtgttgttttggtgcttgttatgtgaaaataaagtgactgtaaaacgatttttttttttttgagacaaagtttcgcttttgctgcccaggctggagtgcagtggcacaatcttggctcactgcaacttccacctcctgggttcaagggattctcctgcctcagcctcccgagtagctggaattacaggcatgtgccaccacgcccagttaattttgtatttttagtacagacagggtttctccatgttgatcaggctggtctcaaactcctgacctcaggtgatcctcccgcctcagcctcccaaagtgctgggattacgggcgtgagccaccgcacccggccaatttttttttcttttttgagacagagtcttgctctgtggcccaggctagagtacagtggcgcgatctcggctcactgcagcctctgcctcccaggttcaagcaattctcctgccttagcctcctgagtagctggaattataggcatgtgttaccatgcccagctaattttttttttttttttttttttgagacagggtctcactctgtcgcccaggctagagtgtaatggcacaatctcggctcactgcaagctctgcctcctgggttcatgccattctcctgcctcagcctcccaagtagctgggactacaggcacccaccacca[131 bp omitted]caccgcacccggccacacccagctaatttttgtattttttgtagagagggggtttcaccatataggcaagtcaggtcttgaactcctgacctcaggtgatctgcccacctcggcctcccaaagtgctgggattataggcgtgagccaccacgcccagccttaaacagttttttgaaagataatttataggccgggtgcagtgtctcattcctgtaaacccagcactttgggaggccgaggcgggcggatcacctgaagtcaggagccatggcgaaaccccgtctgtactaaaaatacaaaaaattagccgagcatggtggcaggtacctgtaatcccagctactcaggaggatgaggcaggagaatcgcttgaacccaggaggcggaggttgcagtgagccgagatcgtgccactgcactccattctgggcgacaaaagtgaaactccttctcaaaaaaaaaaaaggaaatttatattcaagttcttattctttcaattacttataaattaaatggcttatgggttgactgttttcttatttatttatttattttaagatggagttgcgctctgtcacccaggctggagtgcagtggcatgatctcagctcactgcaacctctgcctgctgggttcaagcaattctcctgcctcagcctcctgagtagctgggactacgggcatgtgccacaatgcccggctaattttttgtttttttagcagagatgga[136 bp omitted]tttttggatgtgcggtctttattctttccaataaaagttttaaaaaaaatgcttttcataagatttcctttaaatgagtatatttcctttaaatgagtgtagtcagctggatttttttttttcatggaggtactaagtgtcccatttcgctgatgaccagcatggttactgaaagccctttggaccctagcagaatatgccaccctgaaatatgccactttggcataaggattattttgagctgaaggcaattgaaaagaaacagataaatctgtctgcccttcctaaaaacaggacataaatgcacagaagagttccatcttccctctcttacaggaagacaaaagttaatcaccacagacaactttagaccattatcagcgtacataacaaattttactagctatcttttatctccagttagtttcaatatttgctgcctttagagacttagggtccttttcctttgtcttgttacttctctaaaaatttactgtaccttcgggacgataagctcaaatcttttttttttgagacagaatctggctctaccgcccgggctggagtgcagtggcgcaatcttggcttactgcgaccttcacctcccaggttcaagcgattctcctgactcagcctcctgagtagctgggagctgcgaatacaggcacgtgccaccatacctggctaatttttgtatttttagtagagacagagtttcatcatgttggccagactggtctcaaacttctgacctcaagtgatcctcctacgtcggcttccctaagtgctgggattatgagtgtgaacacctgtgcccagctccaaatctaaccaaacttttgagttactaatctctggactcccctgtgttgttacatgcactatgcacaattaataaactctttctcttgttaatccatcttttgtcagtccgatttacagggctccagccaagaaacctaagagggtggcaggaaaaggagtttttcttcccttataccttaaagctacctatttcacaatgtgtgtttgtaatagtgtcttaaaaccttactgtaactagagtaggtgtagcactaggatataaagtttttattt[151 bp omitted]ggcacccgcc[131 bp omitted]caccacacctggcctaaagtttttaaatgattgatatgagattaaattgtcattgttttggtgaaaatttgactctgctaagtgtctatttgcaataggaaatgttttctattttaaaatatagcttcttgttttttcagtgttaatatttaagtacattttatttatttttaatattttactttttgtgaaacagggtctcactttgtcatccaggccggattgcagtggcatgatcacaattcactgcagccttgacctccctgggctcaggtgatcctctcacttcagccccccaagtagctggggctacaggtgggcactaccatgcccagctaattttttttgcattttttgtagagacggagtttcaccatgttgcccaggctggtcttgaactcacgggctcaagagatctgcgtgccttggcctcctaaagtgttagaattacaggcgtgagccaccacgcctggctaagtgcattttaaaatgcagtaactggccgggtg[174 bp omitted]gaggcaggagaatggcatgaacccaggaggcagagcttgcagtgagctgagatcacggcactgcactccagcctggaggacagagcaagactccgtctcaaaaaaatgaaaaagaaaaaatgcagtaactgattggtttctct[131 bp omitted]gcctcagcctcccgagtacctgggattacaggcatgcaccaccacaccaagctaatctttatatttttagtcgagatgtgttttaccatgttggccaggctggtcttgaactcctgacctagtgatccacccagcttcccaaagtgctgtgattacaagtgtgagccaccacgcccagcctcaaactgtttgttttaaacatccaatctaagaaagattttatataattgttgccagttaaatatcaaattatactatagcattcaagagaaaaaatgcttcatttgaacattttttctaactgtgttttatttttttgtttttttttttgagacagagttttcattctgtcacccaggttggagtacagtgccgctatcattgcttactgcagccttgacctcccaggctcaagcaatcctctcaccttaacctcctgagtagctacgaccagagttgcacaccatcacacctgactaatttctgtattttttgcagagatggggttttccatgttgcccaggctgccgttaactcttaatttgtagtcctatagaaaaaagcaagaaagagaaacttccattatgttacttctgttcaatgaagccagtgactagaaatatgaaaaggcaggcattaaaacactagttgtatatgtttataaataattttacatagcctaatatgtaaggaaacagtggaaaaatgtgaaaataatagatcaggtcgggtgtggtggttcatgcctgtaatcccaggcgtgaatttgggaagctga[133 bp omitted]gaggcaggacagtcgcttgagcccaggaggcagaggttgcagtgtgccaagatcgcatcactgcactccagcctgggtgacagagtgagactttatctaaaaaaaaaaaaaaaaaatcaagtggctgggcacagtggtttatgcctgtaatcccagtgctttgggaggctggggcaggaggatcccttgagcctaggaattcgaggttgcagcgagctatgattgtgccactgtgctccagcctgggcgtcagagtgagaccttatctctaaacagattaagagagacatcaggtggggggcggcgacggatagcattaggagatatacctaatataaatgacgagttaatgggtacagcacaccaaaatggcacatgtatacatatgtaacctgcacgttgtgcacatgtaccctagaactttaattaaaagatcaggaattatgaactgtttatagtaattttgctataatttgtcatctttcagttaaagaattttgttatccaaaggagaacattttgttattaaaaagcattgtttttctacaattgccaatacatccaaacaggtaaaactaattaagagtgttttgttgtttcagaacaccgaaaagctttggaggatttcactcttgataatattctttctcatatttattattttcgctgtcgtgactacacagagttactggcacaagtttatcttcttccagatttcctttcagaacactcaaaggtatgagtcagactactgaaatgtaactaaccaagtattttttgaggtgtttgataagcatgaaaaaataaccagtacagtagcataaaatcaaagtcaaagccaattgagaaaatctcttccttccttgacctacaatttatttatatttatatttgttttgtgtatgtatatgtatatatagtttatgctcagagtaagaaattgaaataatatagaagtttcatttccagtaatagtggaatagctcctatcaaaccacattgtatagaaaggtatgaaatgaaaaataaaaacttccttgtgctactgttttctagtgcctctccccaaaggtgatcactattggccaggtgcagtggctcatacttgtaatcccagcacttagggaggccatggtgggaggatcatttgagcccagtagttcaaaaccagcctgggcaacatagtaagacattgtccccaccaaaaaaaaaattagccgtgtgtggtgtagctgtagtctcagctaccaagggctgggtggagcaggcctgaggtgggaggattgcttgagcccagcagttcaaggctacattgagctaccgtgccatcatgtatcacctttttttttttttttttttttttttttgggtagaaatggagtcaactcctggggttaagcgattctcccacctcagcctcccagagtgctgggattataggcatgagccactgtgcctggccctttaattttggtaaacattatcagtgacaaagattctccttgactgaacttggccccatcctgtctttggcctacccagtccagtcttagcaaagaatcctgctgtcagttcagagagattctctcacatttgatagtctgagcacctttgatacctgatcacgttcctcattccccacctttgatatttaaatccttggcttgcctttatttatttattttttattttttaatttgatggagtctggctctgtcgcccaggctggagtgcattggcgtgatcttggttcactgcaacctctgcttcccgggttaaggcaattctcctgcctcagcctcccaagtagctgggactacaggcatgcgccacaacgcctggctaatttttttttttttttatatttttggtagaaacagggttttgcatgttggccaggctgctcacctggctggcctgccattagtaagaatcctgttcggtcagtttagcaagaatttccctacccttgatgtctcactgttagtaattgttcatccactgaccccttcaccttgctcttggttgtgaatccccagttgtccttgtattctgatttgaacccagtctctctcccctattgtgatacccctattagaatagtcttgaatacagtctccttactgttttaagaagtgttagaataattttttcttgaacacatatcgcccttcagaaagactgcaccaatttctactcttactgacaatatatgagaatgcctattacccatcatcctgaccttttgaatatttttgccaagattctgcatggaaaatgccatctctttgttattttatttattttaattaattaattaattttttttttgagtcgcccagtctgactaacatggcaaaaccccgtctctacctaaaaatacaaaaattagcctggtgtgttggcatgcacctgtgatcccagctacttgggaggctgagacaggagaatcgcttgaacctgggaagcagaggttgcagtgtgctgagatcgtgacactgcactccagcctgggagacagagagactctgtctcaaaattaataaataaaaattaaataaataaatacaatagaaattaattttcttagagttctggagcctaaaagttcaagatcaaagttctagctgattcagtttctggcaagggctttcttcctggcttgcagacagccatcttttctctgtgtcctcatatgatagggaggaaaagaaggagagagtgaattccctggtgttttttcttttttttggggggggggtggagtttcgcttttgtcacccaggctggagtgcaatggcgtgatctcagctcactacaacctccacctcccggattcaagcgattctcctgcctcagcctccagagtagctgggactacaggcgcatgccaccacgcctggctaatttttgtatttttagtagagacagggttt[143 bp omitted]agggtcccatctttatgaacttatttgattacttccttagaagtcctttctccacatacattcacattggggtttagggattcaacatacgaattttaaggggacataattgagttcccagaagtttgcccctggccccttgcccccctaccccctacctgcccgccaaattcatgtttttcttgtatccattccatccacacagccccaaacgtcttaaccggttccatcatcaactctaaaagtcccaggcttcatctaaatattatctaaatcagagattggtgagactcaagttataattcatcctgaagtgaaattcccttccagctgtgaacgtttgaaatcaggcaagttatatgctttcaaaatacaatagtaggaaatgcataggatgaacattcccaaaaggattatgggtgcctagcaaggcaaatttcattggaccataaggctcaagaataatcctttgctggccaggcacggtggctcatgcctgtaatcccagcactttgggaggctgaggcaggcagatcacgaagtcaggagtttgagaccaccctggccaatatggtgaaaccctgtctctactaaaaatacaaaaattagccgggcatggtggtgcgtgcctgtagtcccagctactagggaggctgaggcagaagaatcacttcaacgcaggaggcagaggagattgcagtgacatgagatcatgccactgcactccagcctgagtgacagagtgagactccatctcaaaaaaataataataattaaaaaaagaatgatcctttgctttgatgctctgccttccaggcccactgcagtagcagaatcaccctactgctctgtggggtggccctgccccttcctctctctgcaagggccccaccctctgaaaccaaggacgacatagcattgccccctgggcttatggtaagagtgacagctctgaggatctgtgatcccctttggcaccattctttccttttcttgaggaatagggcacattcacagtcaagtagctcatggttttctcttgtggaatcaaggaagtccaacagccttcgttcattctttcccacttactctgtcctctttacttcaaactagcagtgtttctgctgttataatcccttatctatcactggcttctgctgagatggctgattaacatcatggataatctatttatagagtcattgttcaaccgtacctttggtcttctctctagagcaagctttcttatttttagcaatatggataggctgagaattttctacatctctaagttctggttccttcttgctgaacaattccttcttcaattcatctgtctcctctttcatttttactataagtggtctaggagaaaccaagccacttcctctacactttgcttagaaatctcctgagataaatagccaatttcatttctcacaagttttaccttccataaaatactagaacacagccaagttctttgccactttatactaagcaccagctttccttcagtttccagtaacttgttcctcatttctgtataaatcctcaccagaatagccgggcatggtggctcacacctgtaatcccagcactttgggaggctg[136 bp omitted]tgaggcgggagaattgcttgaaccagggaggtggaggttgcagtgagccaagaacgcaccactgcactccagcctgggcaacagagcgagactccatctgaaaaaaaaaaaaagcctcaccagaattgcccttaatgtccatattttcagtatgtgcctcaaaactgttccagcctttgcttattacccaatttgaaaatcacttccacattttaggtatttgttatagtagtaccttgcttctctcactacctaacccaccatacctcatttcttgatactaaaatttgttgtggtcacctcaggctgccataacaaaaatactatagtctgagtggcttgaacaacagaaattttattttcttacagttctggagactagaagctcaagataaggttctggctgattggtctctggtgagagctctctccctggcatgtagatggccaccttcttgctgtgtcctcatggggaggaaggaggaagagtgagctctttggtgtcttttcttcaaggacactaatcctctcaaatcaggatgtcattctcatgacctaattttacgttaattactaccttagaggccctctctccaaatacagtcacactgggagatagggcttcaatttacgaatattggggggacacagcagtggtcatgtgtggagtcatgaaaaatcgaatcaacctgtgcacatattcccagctgacgttgaacaaggtcatgttctgcctttttatttcagctctctactgtaaacaagtgtccttttcacagtctttataatgccacttttttttgcatttttgtgctttttattagtgttcacctgttcttcatcacttcaaccagtttcattttcttataattatcggaaattaccttatttgtgtgtttgtttgcatattaatggtcccttactccactaaaacataacctccaagagagcagggaccttctctcttatttactatattcttctctcttatttactatatcatccccaatgcctggaacagtaaatagcatataggaaaggaggtgtcaattaatacttgctaaatgaagaaacaaatactctaaataaaacaacttacttaggcattgcttcataaaagcctcttgtttaatccaacccttactagatagaaaaaaacatagcattggagtcttttgtttgtttacatttgggttagtttccagattctttttgatttggggatcttaaggtttatatattggtttatttttctaacttcactgtttattttttgctttggggggggctttcttttgaaagggttttgctctgtcccccaggctggagtgcatggcagggtttcaccacgttggccaggctggtctcaaactcctgacctcgtgatccacctgcttcggcctcccaaagtgctgggattacagatgtgagccaccgcgcccagcctgaaggtttttttgttttttgttttttgttttaggaaacataaaaagaacccggaaggtaaaattggtatatttaattgacaaatgtgttgttttaccaagactttttctttaagccttttcagaatgttttacaaagactttaaatgtgctttttatcagtaaagactgtgtacagtggcaagttaaagaaaattataattattcctttttctttttgaattacttttttttttttttttttttgagacaaagtctcactctgtcgcccaggctggagtacagtggcgcaacctctgccaccagggttcaagagattctcctgcctcagcctcctgagtacctgggattacaggtgcctgccactgtgcctggctaatttttgtagttttagcagagatggggtt[132 bp omitted]tatcaaagcagagtccgttttaacttttagtgattattgcagaaagcactggctgaacagctttgtaactttccaaaagaaagccatactttagacagttggaaataaagccctgggttttaaggttttttcctgtaatggactatggtttttccaatgctatgtttttttctatctagtaagggttggattaaagaagaggcttttatgaagcaatgtctaagtaagttgttttatttagagtatttgtttcttcatttagcaagtattaattgacacctcctttcctatatgctatttactgttccaggcattggggatgatatagtaaataagacagaagaatatagtaaataagagagaaggtccctgctctcttggagagagagagcatttttattattattattttatttttcgtaacaaatctaatattatctcttctgtatttaggttcgactagtgatagtggatggtattgcttttccatttcgtcatgacctagatgacctgtctcttcgtactcggttattaaatggcctagcccagcaaatgatcagccttgcaaataatcacagattagctgtaagtattaactagtgaagagagttttataacaaagtcaagactgtataaaatgttaatgtctagaaatgtcaaaatagcgtttgcctgacaaataatatagacatgcagttttgagtaaagttacgtttggttggtttccattaaaaaattctggtcataagtgtcagttttcctgg[133 bp omitted]aaccctgtctctactaaaaaaaaaaaaaaaaaaaaaaaaccaaaaattagcccggtgtggtggcatgcccctgtaatcccacctactcgggaggctgaggtaggagaatcacttgaacccaggaggcggaggttacagtgggtggagaacgcgccatcacactccagcctgggcagcagcaagactccgtctcaaggcaaaaaaaaaaaaaaaggactttgtttgataaagaaatgccacctttgttaattgcagtgtcttctttgtttaaatatactttggatgtttttcaggttaactcttccaacatccctggttttcttctcctttgagtctttgattattatgtggtatgtaatcacagattcagatggattgaaacataaccggtgtaaacaacctagatgctttgaggtagagctaaataactcttgaagatttgaaatgtgaggagagaagtaaatatcggctcagaagggaagagatttttttttttaaagttttacctcactcctctttaactgcttgtttgccattacttcccaccctgaatccacatcccaccactgacacaaatacacacatttgtctgggagtaagatgtaaggtcaaactgcttaacttgatttctttgtctttaccttaattagagagaccttagcacatacctgtaatacatcataagtaaataaagaacttcctcagtaaagtcattttaaagcatacttttttctttgaatttccaattttttttgccatatgctgaaaagcatagtgccctgtgtttgaattactttttgcttaaattaattgtaatttagccttttgttaatatcagtgaagagcctccagtagggggcactcaagactaataggttgcatagttccttatgtttttaacagaaatagcttcaccttttccgactaaaaaagcaatccaaacaataacatcaaatagtaggtagtgtttaagaagagtgatgtaaatataaacgtcctaacatggaagaagatatatacatatatgttattgagtgaagaaatttaagttgtatataaaatatatttaatgttacctcagtttagagaaaacttataattatatgtatgcatttatatttgtatatatgaagagaaagatctgaaaggaccaaaacattaacagtggctacttcttttttatttttttggagacagaatcttactgaagtgcagtggtacaatcagggctcgccacagcctcgacatctcgggctcaagtgatcctgccacctcagcctccctagtagctgagactagaggcacatgccaccatgcccggctaatttttgtatttttttttttgtagagatggggtttcaccatgttgcccagctggtcagaaggcggaggttgggctcaagcgatcatctgccggcctcagcctcctaaagtactaggattacatgcataagccactgtgcccagacttggcttcttcaaaggatgggattttgtagggttagggacacactttccctctcttactttataatttctttgcttgaaggttttttttcccaattaacatatatataacatgtatggcttttgataatgtattttataattttaaggccagatgtggtaactcacacctgtaatcccagcacttttggaaggccaaagtgggaggaccgcctgaagccaggagtttgagaccagcctgaacaacaaagcttgaccccatctctaaaaaaaaaaatacataaaataagaataattggccgggcacggcggctcacatctgtaatgccagcactttgggagactgaggtgggcggatcatgaggtcaggagttcgagaccagcctgaccaacatggtgaaaccccatctctactaaaaatacaaaaaatagtcaggcgtggtggcatgcctgtaatcccagctactcaggaggctgaggcaggggaatcatttgaacccagaaggcggaggttgcagtgagccaagattgcgccactgcactccatcctgggcgagagagcaacactccatctcaaaaaaaaaaaaaaaaaaaaagaaattttaagttatgtatgctttttgtaaaagaaaaaaaaagttctaaacaataaaaaatgtaggaagcgattattcattactcagagattgtgtaaatattgttgtctggtgtaaatatttttgcagactt[185 bp omitted]atggcgggcgcctgtaatttcagctactcgggaggctgagg[214 bp omitted]atagtgagacttcatcgctacaaatttttaaaaaaatcttagccaagcatagtggcatgcacctatagttctagctacttaagcggctgaggtgggagtattgcttgaggctgggaggcaaaggttgcagtgagctgagatcgcaccactgcactccagcctaggcagcagagcaagaccctgtcttcaaaaacacaaaaagaaatgaaaatgaggtcatattatacatgctattatgcaaagcagttttctgtttttcacttaatatattgtgaacatctttccatgtatactactttttttttccatgtacactacttataagtctgctttacactaacagctgcatagtattttgctgtatgactgtagcataggttttttttgtatttgtatttgtttttgggttttcttttttatgagacagggtctcgctctgtcatccaggctagagtgcagtggcatgatcttggttcactgtagcctcaatctcctgggcttaagcaatcctttcacctcagcctcttgagtaactgagaccacaggcacacaccaccacacccagccaatttttaaattttttgtagaggctgggcacggtggctcacacctataacccaccactgtgggaggccagggcaagcagatcacttgaggtcaggagttcaagaccagccttgccaacatggtgaaaccttgtctctactaataatacaaaaattagccaggtgtgttggtgctcacctgtagtcctagctacttgggaggctgaggcaggagaatcacttgaactcgggaggtggaggttgcagtgagccaagatcacactgttgcactccagcctgggagacacagtgagactctagctccaaaataaataaataaataagttttttgtagagatgaggtctcactatgttgcctaggctgttcttgaactcctgggcttaagggatccatctgcttcagccttccataggcatgagccactgtgcccaccctgtagcgtagtttttttaaccacctccttattgatggtctctctcttttttttttttctgttttagatagagtcttcctctctcacccaggttggagtacagtgtcacactcttggctcactgcagcctccacctcccaggttccagagcttctcattccacagtctcccgaatagctgggattacaggcgtgcaccaccacacctggctaatttttgtatttttagtagagatggggtttca[131 bp omitted]aagccaaaggaatcgatttttgaacattttgttttatgttataaaattaccctcagaaactatgctccaaagtatgtctctacagcaatgaatgggaactcttgttttcccatatctttaccaactttgggtaccagtcttttatttatttatttatatctttgagacggagtctcgctctgtcgcccaggttggagtgccatggcgcgatcttggctcactgcaacctgtgcctcctgggttcaagagattctcctgcctcagcctcccgagtagctggaactacaggcgcgtgcca[147 bp omitted]gtaccagtcttttaaatctttgccaaattgatatggagaaagtcctttaaaaatatgttttttggattattggcataattttttaaacagccttaatgacatatatgattcatccttgcagtgtgcacaattcagtgattttcagtgtatccacagagttttgcaaacatcaccactgtataattttagaatatttccgtcatcctaaaaaagaaaccccaacctcacagtgaatttcagaatatttaaaatgtctgctccttcagtgtcacgtttcaaatctcatgcaaatttttcttgcggtcaactataactttgtaccctatggagaaagtaattctggttctgggaaacacacagttccagattattaaaaaaaaaaaaacaaaaaaaaacaaaaaacctcttttcagctgggtgcaatagctcacccctgtaattccagcactttgggaggccaaggtgggtggatcacctgaggtcaggagttcacaaccagcctggccaacatggtgaaaccccatctctactaaaaatacaaaaaaattagccagttgtggtggcaggtgcctgtaatcccagctactcaggaggctgaggcaggagaattgcttgaacccaggaggcggaggttgc[131 bp omitted]aaccactagtatgctttctgtttctgtgaatttgtcttttctggacattttatataagcagatcatacagtatatggccttttatgtctgacttctttcacttagcgtgatgttttcaaggtttatctgtattttagcacccatcagtatctttttaatgactaattttgcattttatggatatatcacattttgtttatctgttcattggttgaaggacattgcatggcagaaatatttttaaagctctgaagttc[138 bp omitted]atggtgaaactctgtctttactaaaaatacaaaatttagccaagcgtggtgggggacacctgtaatcctagctacttgggaggctgaggcaggaaactctcttgaacccaggaggcagaggttgcagtgagccgaggtcatgccactgcactccagcctgagcaacagagcaagactctgtctcgaaaaaaaaaaaaaaaagcacttattctttagaagcttggcataatcacatactaattttcagttgtatcatggaggccaatcgttttgcaaaagtaatataattgctatataaatatttgctaataatggaaattctaattttggcatgttgaatacctggtaaatcagtagtttgatttatattttcctaaagatacgtagtgcgtaaactaagtactctctctaaaccagcactgtccagtagatctgatggaaagatgaaaatgtacagtctagtacagtagctgcatgactgttcagcacttgaaatatagctaatactactgagctactgaatt[136 bp omitted]gcctccctagtagctgggactacaggcgcatgccaccatgcccagctatttttttgtatttttagtcgagacagggtttcaccatgttagccaggatggctttgatatcctgaccttgtgatcctcccacctctgcctcccaaagtactgggattaccggcacaagccaccacgcctggcttctaatgtaactttttttttttttttta[132 bp omitted]tcctgagtagctgggactacaggcacacaccaccacgcccggctaattttttgtgtatttttagtagagac[134 bp omitted]ccaggcacagtggctcatgcctataatcccagcactttgggaggccaaggtgggaggatcacttgaggccaggagttcgaagttaatctgggcaacatagcaaaaccctgtttctacaaataatttaaaaattagttaggcatgcctatagttctagctagtagaacttgtgcttgaactatagttctagctactggggaagctaaggcaggaagattgtttgagtccacaacttcaaggctgcagtaagctatgattgtgtcattgccccccagcctgggtgacagagtgagaccccatttctaaaaactattcttaagaaaagctgccggccgggtgtggtggctcatgcctgtaatcctagcactttgggaggccgaggtggagatcacctgaggtcaggagttcgagaccagcctgaccaacatggagaaaccccgtctttaccaaaaatacaagcttaaccaggcatggtagctcacacctgtaatcccagctactcatgaggctgaggcaggggaatcgcttgaactcaggaggcggaggttgcagtgagccaagatcatgccattgcactccagcctgagcaacagagtgagaccttgtctcaaagaaaaaaagaaaaagaaagaaaagctgccaatttaaattcctgcttagctttttctaaggtgcccgatgagaggtaacaaatggagaatgccctgtggcatgtaaggggaggggagctagaagaaaatcatgtcatccacttggtatctaattgagatctagatggatcacagatttctcctttgcggtgaaacagaaattttagggtgttaccactgcagtgggaacagccaaacaaccttttttctttcgcagttttctttttctttttttttgagttggagtcttgctcctgttgcccaggctggagcgcaatggtgcaatattggctcactgcaacctctgcctcctggatttcagtgattctcctgtctcagcctcccgagtagctggggttacaggtgcccgccccaacgttcggctaattttttgtaattttggtagagatggggtatcgccatgttggcctggctggtctcgaactcctgacctcaggtgatctacctgcctcggcctcccaaagtgctgggattataggcatgagccaccgcgcctgggctgtttctcggttttcttacataaaaaactcattttcagagtagacacctttttcttactgcttttcatggaatttcattatcagttttagtttgcaatattaactctttttttctggagggaagatatgtattagaagagtatataaagtaaccatttctggagatttggggatggaaagataacagatctgacttctgtgttaagtcagccttaaacgcttttgttttccctgctttatttaaaattactgtctttcaaaacctggaaccttttttgtaggtcagtatttatacaaagagaattagcaatatgaaaccttgagggccatctgtgagttgcaaagcaacacctgtggctgttaatagctgagtagcataatcataatttggagtcatttgacctgactactaggattttttttttcctagttcatctacttatattgtaccttctttatgagttttaagtctcttctcataatttgttgcctcagtttctttttttcctataaaattataaacagtaatactatatttgcttccttcttaaaagtataaacattgaggtatttgttaaggatttcatattcctttcaataaaaatattctagggaggcaatagtgataaagaacatggactcaggccaggcacagtgacacatgcttataatcccggccctttgggaggccgaggtgggtggatcacttgaggtcaggagttcgagaccaggccggccaacatggtaaaaccccatctttactaaaaatgcaaaaaattagccaggcatggtggcaggcacctgtaatcctagctacttgggaggctgaggcaggagaatagcttgaacccgggaggcggagattgcagtgagccgagatcgcgccattgcactccagcctgggcaacagagcgagactcagtctttcttttttgagacaaggtcttgcttggtcatcaggctggggtacggtgacagaatcatggctcactgctgcttcaacctcctgggctcaaccaattctcctgcctcagcctcctgagtagctgggactacagttgtgcaccaccatgcccagctaattttttaaaaagttttttgtaggtcaggtacagtggcttatgcctgtaatcccagcattttgggaggctgaggcaggaggattgtgtgagcccaggagttcaagatcagcctgggcaacatagcaagaccctgtctcttaaaaaaaaagttttatgagctagatgtggcaaacacctctagtcccagctgttcaagaggctgaggtgggaggatcatgtgagtctaggacttcaaggaccacctgggcaacatagcaagaccccatctctaaagtatgaaaataaaatactttatgatcagtagaatcatattttcaggtaactacatctttttatgggtggatttttaatttttttttttttttttgagatggagtctcactctgttgcccaggctggagtgcagtagcgctatctcagctcactgcaggctctgctccccgggttcacgccattctcctgtctcagcctcctgagcaactgggactacaggcgcccgccac[184 bp omitted]aaaatttgtattacttaaatggctggctataataggtagattaatttcatattactaaaatcacaggctgggcgcggtggctcacacctgtaataccagcactttgggaggccaaggcaggcagatcacgaggtcaggagatcgcgaccatcctgactaacacggtgaaaccccgtctctactgaaaaaatacaaaaaaattagctgggtgtggtggtgggcgcctgtagtcccagctacttgggaggctgaggcaggagaatggtgtgaacccaggaggcagagcttgctgtgggcagagattgtgccactgcactccagcctgggtgactgagcgagactctgtctcaaaaaaaaaaataaaataaaaaataaaatcacaagactgtttacttgattatttatttatttatttatttagtgagacagagttttgctcttttgtccaggctggagtgaagtggcacgctcttggctcactgcaacctctgcctgccccaggttcaaatgattctcctgcctcagcctccggagtagctgggattacaggtgcatgccaccatgtctggttaatttttgtatttttagtagagatggggtttcacaatcttggccagactggtctacttgataattttcaaagagactcacctaattttcttacattttgtttttgtaggtaattttaaccaatcagatgacaacaaagattgatagaaatcaggccttgcttgttcctgcattaggtgggtaattaatcagataaacattttagtttatcacagtttttcttatctctttcatttgattctcattgagtactatacgcttcatgaaagcagactgtatttgtcttgttcactggttaatcttagcactaagcacagtaccgttagatactgattgttccttttagttatttaacatttattgagtggccagacacagtgtcccacacctgtaatcccaacaccttgggaggccgaggcggatcacttgaggccaggagttcaagaccagcctggccaatatggtgaaaccccatctctactaaaaatacaaaaaattagccaggcatggtggcacacacttgtaatcccacctacttgggaggctgaggagtgagaattgcttgaacttgggaggcgcaggctgcagtgagctgggatcgtgcatctgcactccagcctgggggacagagtaagactctctcaaaaaattgcgtatctactgtctggcaactgttgtgtcaaagattcttgcccccagggagttcacagtgttagggagaaggaaaggtgaatccacttaaatacaaatcacactacagtgaatatcgtggttttgttagaatgtagtgcttcaagatttatttccactaaaatcttaaagaatattctaccagagtcttggccaggtacagtggcttatgcctgtaatctcagcactttgggaggctgaggcgggtggatcacctgaggtcgggagtttgagagcagcctgaccaacatggagaaaccccatctctattaaaaatacaaaattagatgagcatggtggcacattcctgtaatcccagctacttgggaggctgaggcaggagaatcgcttgaacctggggggcagaggttgcagtaagccacggtcgcgccattgcactccagcctgggcaacaagagtgaaactctgtctcaaaaaaaaaaaaaatgtatctgcccttgactagttttcaactaatggcatagatcattctataaacagataatgtagtaaaggttacaatagaaagtacagggtactgtacaaaggacggattctaacctggcccaggtgagcaggatgaaaaggaggaaggttagggaagggagtgtaatagtctgtcatgtttcttccagctgtttttgtcattttctatcacccacttaagcaagagcttcctaatgtttggatccactcaggggtaatcaaactcagcctttctcaaactcatgccctcagcacactatgataaatcagaaagcaaatttataaatttagtgagaattacagttgtcaagcagaatgaagtttatgttttctagtcagtttattttcttcccagataccaggaagttgggaaagcaggggttcagagttggtaagcagagaagcaaataaatggaaatggatgccctcaggaatattatgcttaagttgtgataattctgatgccctccttggtttactagcagaacgccctttaccttggatattgctaggatattgttcaatagaatggtcagttatgatagaagtgttctatgtctgtgctcttcagtacagtagcccttgctacatgtggctattgaggcatttaaaatgtggctaatgcagctgtggaatggaatgtttaattgaattttacttaaatttaaattgcacatgtggcaagtgactgccctgttgtgtagtgcagcactggataaacataactcctgtgttctagactccaatcccaccattagctttctgtttttgacagtgtttgctagtatgataggtcactgctcattttacattactatcagtttagtttcctttatatttcagaggctccctaatcccttaaagagatttaaaaatcaacgtagaccacttctgtatgaaaataagatggctgaatttgctttgattggaattaggaactggcgctctctttgctagttctggaatttggccaggatgcacatcaaaatctcattcctaccctcctgatttgcctcatgcaaactttgttgctgtgtctgttctttggtcttctattgctgtgtctcagctttagattatatgtcttgcgtagaaatggatcatcagaatgcaacaggcagaagacttagaattgcaaatcagtagggtaatgacaaaccctttgagctgagtgggactgaaaagtaacctaacatataacctattagtaattgttaaccatgaagattttcagtgctggacacataaattgctgagttcaactgccctctttgccctccaaatctagcataaaacaaattggtgatctcaggccagtttcacacctaatatgactaataataaaagtcttgtgtttcaggaactcagtttgtccaaacctgagcccatcatctctacctcacaaattatatccaccttttcatttccttgcactgtgtctgcatgatatgataatactcccaagcactattgcttaaatcttgagttacacttaatgcttttttttttggtcttttttctttttaatgtgaaatagaatatacaaatgaaaatgtatatttagaagaacaataataaatgtccaggtgcccattgctcagactgacaaatggaacattactaccccccaggagcctcgtatgctctccccccaagaggcaaccactatcctgaattttgtgtaattgtcacctagcttttatagattttactgtctgtgtatccctaatagttgcttatttctagcctttatataaatagaattatactgtatatgactgacaacttttgctcattattattttttgattcatccatgttgatgtgtgacactgtagttcatttcgatgacatgaatatgccacaacttaattatatattctgttgatgtcaaaaaaaaaaaaagaatattctaccagagtttttacttttcttctggaggtcagaaatacgttaggcttgatgatatggaaaattgacacatatatggactcagacaataaagttttctaaaagcaaatagagaataatgatttgcagtatttccctagataggtaaaaaccttgtaatctcaggatattactcattttccaggttttttgaaagcaagtatactttcgttatgttaaattaataaagtaagattatatttgatcagaggcgttctgagaaatgtataaccaagtcagtaaggccatatacagttattatgttttttactctcaggggaaagttggggacatgctgctacaatacggctaatctttcattgggaccgaaagcaaaggtcagtacagaaacaagttaataactccgaatattgggttaattatactgaatgaacacttacaggtttcttagagctagtcctgtggatgagatatacagtgacccatgaagtgacacttttgttgccttgtctgatatcacctagagcaaacatagaaatgtgttgttattactgcatatttagctacataggaaattctctggaatatttaaatgatggggcgcatgcacctgaaatgagtaggtggccaaggaatgccattttctaaagctcttcgaaataatttattagccatgtagaaggaggtgagtactctgtgttcctggaagagattgaaaaaaaaaagaataaaatcaggacaaaaggaaaattgttgaggttacctttaaaattaatttatttggaacatacgatggtttctcttatttgcttagtatatttcttgtatgaaattgtgtctgtttttttttttattttgtattttgctgtccagcttttattatccagttacttacctgcatttcacaagtattgttctttaaaagtatggcagcatgaaatctttgtatttgtttttaaagctgctgagcaagtgaacaaaccagcttttattttcttgaaaatagaccattgaaagctgtgaagtcttttctacacttctagaaaatgtcagattcatgctagcctctccgctttgtgattaattggtataacctagaggtcttggtttggaaatgctctaataaagggagaaattaaaatggcatgtgggcaaagatggaataaaaggtcacttaaatacatattgggcctagccagtgaaaatgtctattttttaatctatatttctttgttgttctacaaactgaaaaaaatcctgcctgaccaagttaggttttacggacctgaagctcataacagaatgattacacttctgtatatatcttttgcaactgatcgtgcagtttgggtcttctttaaaaatggtatttgcaaagagctcaggtagtgttttttttcccccacaatacgtagtgctttactattgactgtcgccccctaatttaaacacattttttactctaaaccagtatgactggtaaatcctccccctaattttttttctatgatcacaatttaaggtagttcctcctagttttgtaagtaagttgctgtatactagagtcacaaaaggagttattttctcggcaccaaaccttattgtaaagatttggcaacagttctccagctgtcttttgaacatattgcttatactttcccagttttaggttattctgtaaagcacattccgtcatttattttttcataggaattacgcctgagttagtatacagtagtcttcttcagactataattaaatatttactaataaaatgcatttaagaagaaaaataataggaacagagcaagatatttcatctttttatgaactcaacaggaggaaaagtttgccttctttgtcaagttctagaagttagcattgataagttatccaagagatcagaaaatcacgcttaccatgagttaaccattgtatgaattcaccttcttacaaatccttcccaagaaattagaaactaaagtacatggccggatgcagtggctcacacctgtaatctcatcactttgggaggctgaggtaggtggatcatggggtcaagagatcaagaccatcctggccaacatggtgaaaccccatctctactaaaaataaaaaattagctgggcgtgatggcacacacctttagtcccagctactcaggaggctgaggcaggagaatcacttgaacccaggaggcggaggttgcagtgagccaagattgtgccactgccctccagcctggttacagagtgagactccatccaccccctgcaaaaaaaaaaaaaaaaaacaagaaaatgatgtacaacaccaacactgaatatagatagattgggggaaatctgctgttctataatattttttctacatctcataagatcatttttttaattcttatttttattttatttatttttcatactctcattttagtgagtgcttgcttgtgctaggtattttactaggcactttaaatataacatttcagataatcttttcaataattatttgcagaatgtatacctattattattaaaagaaaaccaaggcccagaaaggttaactgaataagtagtaaataatagctactatttattgaatatttcttaactgtcctttattgtgcaaagcactgtatgtatatatgtgtacatatatacgtgtatgtatatatgtgtatatatatagattatatgtatatatgtgtatacgtatagatgtatatacatatgtatatatgtgtatacgtatagatgtatatacatatgtatatatgtgtatacgtatagatgtatatacatatgtatatatgtgtataagtatagatgtatatacatatgtatatatgtgtatacatatagatgtatatatgtatatacgtgtatgtatatatgtgtatacgtatagatgtatatacgtatacgtatagatgtatatacatatacgtatgtatatgtgtgtgtatatatataatttcatgttattttccacgtaaatctttgaaatagtgttaccagatgagatcaggcacattcagggtggtatggctgtagactgaaaatagtatt[355 bp omitted]gtttcgctctttttgcccaggctggggtgcaatggcgagatcttggctcacttcaacctccacttcctggggtcaagtgattctcttgtctcagcctgccgagtagctgggattgtaggcgcctgccaccacaccttgctaattttgtatttttagtagaggtgggatttcactatgttggccaggctggtcttgaactcctgatgtcaggtgacctgcccacctcagcctctcaaagtgctgggattacaggcatgagccaccgcactcggccatagctgactttatggagttcatttcttttcttctataataactgtttctagaaggtaattgtagtattgtgttgattgccagccaatctgaatatgtagcttactcctttttttaggtaaaatcttttttcttcaaacttttttttttcgggctgtggatatatgataaataatgtacatactttatgtaatcaaaataaattgacctcatttaatagcattaaagtagttttgttctttatcatttgaaacctgacatctttaagttgttaaagttgcatgaacttgagcccagaagttggagaacagcctggccgaaatggcaagacaccacctctatagataataaaaaattagccaggtgtggtggtgcacacctatagttctagctgtttgggaggccagagttgggaaaatcacttgagccctggaagtcagggtggcagtgagctatgattgagctattatacttcaggctgggccgcaaaatgggaccccatctctaagatattaaaaaaaaaaaaaaagttacatgaggccgggcgcagtggctgacacctgtaatcccagcactttgggaggccaaggcaggtggatcacctgaggttgggagttctagaccagcctggccaatatggggaaactgtgtctctactaaaaatacaaaaaaattagccaggcatggtggcgggcacctgtaatcccaactactcaggaggctgaggtaggagaatcacttgaacccaggaggcagaggttgcagtgagccaagattgcaccactgcactccagcctgggcagcagagtaagactctgtctcaaaaaaaaaaaaagttgcatgaaattttgtatgctttatgctttttaaattttaggttattttaaaaggatggaaatagaaattcatatcagggaaaaatagttataaaaatgaacatttttcatttggagaggaagactaaaaatcttttttttttttctttttttttttgagacaggatctcactctgttgcccaggctagagtgcagtggtgcaatctcagctcactgcaacctcaacctcctgggctcaagcagtcctcccacctcagcctcccaagtagctgggaccacaggcatgtaccaccacacccagctaatttttgtaatttttgtagagatggggttttgccgtgttgcccaggctggcctcgaactcctaaactcagtcagtccacctacctcggcctcctaaagtactgggattataggcgtgagccacagcacccgtccagaaactaaaaatcttgaatagccaaattatattgggcattgaacttaggtgtgctgtctcatgccccagcccctgtccttcaccagtaacacctgatttttacccttagactaatgatggaataatattccaacagttattaaaagaaatacttttgtctatgtccttatattatgtgagttttcctccaatttgcatattcatggttatatgaggccaagattattcagaattacactactctttgccaagacgatctggtggtagagtggagtaataaatcaacacccccacacagtgtttcatatgtgtgctcagttttagagcacaaattgtgcttctgtcttatttcttcctgacccaaactatgtagttcagccatatgttaagctacatctcagctggggccatgagccaagtgattctttggtttagttttcattttaaaagatctctgaagagacatgatgcataaaagtggtatttttacctagaaatttgaggatgatttttttgttttgtttggttttgtttttgagatggagtttcgcttttgttgcccaggctggagtgcagtggcgcaatctcagctcactacaacctcggcctcccgggttcaatcgattcttctgcctcagcctcccgagtagctgggattacaggcatgcaccaccacgcctggctaattttttgtatttttagttgagatggggtttctccatgttggtcaggctggcctcgaattctcgacctcaggtgatccacctcggcctcccaaagggctgggattacaggtgtgagccaccgcgcccggcctgaggatgattttcaacctgaataattaatgcccctttgactttaggattctttttttgttttgttttgttttttgagatggagtctcactctgtcacccaggctggagtgcagtggcgccatatcggctccctgcaacctccacctccctgattcaagtgattctcttgcctcagcctcccaagtagctgggattataggcatgcgccaccacacttggctaacttttgtatttttagtagagacagggtttcaccattttgaccaggctggtctcggatgcctgacctcaagtgacctgcccacctcagcctcccaaagtgctggattatagacatgagccactgtgcccggccgactttaggattcttaacaagcatgtaaatgcttcttaaaagcttttcactttttaataatttcctcaggatagatgtactaggcaccttttttggacatactgttgatatgaggtgatttagataccaatttttcagaaggctagctgattttcatcattcaaaaaatgacttcttaataaggcaggttaaaatacaccttgcctctctttttctgtgaatttttgcattaaagatagattatcaaccctagggaattataaaagtttataattccactcaacacagctgttcttttttttttttttttttgagatggagtctcgccctgtcgcccaggctggagtgcagaggcacgatctcggctcactgcaacctccacctccccagttcaagtgattctcctacctcagcctcctcagtagctgggattacaggtgcgtgccaccacgcccagctaattttttttttttttttttgtatctttagtagagatgggggtttcaccg[142 bp omitted]tgtttaaagttgcaattacagagtatagaacattttggattctgctgtattttggtctgtgtttttcttttgaattgtgtctgagaagaggggcaatttcaaaattaagagagtaacagatcatagccaaaatgtcctttttgaattgtctttgaaaacaaatcattctattttgtgtaagtaaatgacccttataactctgagaatcttattttcctctaggttagaatctgtattttttagatcagtttcattacattgtgctaaaacatgtatataacataaaatttaccattttatgtttacatatagttcactggcattaggtacattcatattgtgcagccatcatcatccattttcagacctttttcatcttcccatactgaaactctgtacccattaaatgctaactcattcttttttacccccagcccctgacaatcaccattctaccttctgtctctgaattttactcctctagcaaccccatataattggaatcatataatacttgttctgatgtgactggcttatttcacttagtataatgtcttcaaggctcatttatgttgtagcatgtgtcagaattttcttccttaagtctgcatattccattgtatgtacataccacattttgtttattcatctgtggatgcacacttgggttgcttccaccttctggctattgtgaataagttacagtgtatcagttttaaagtaattcttaaaagcagtttttttttttttttttgagatggagtttcactcttttttgcccaggctggagtgcaatggcatgatctcagctcaccgcaacctctgcctcacaggttcaagcgattctcctgcctcagcctcccgagtagctgggattacaggcatgcgccaccacacccggctaattttgtatttttagtagagatggggtttctccatgttggtcaggctggtctcgaactcccgacctcaggtgatctgcctgccttggcctcccaaagtgctgggattgcaggcgtgagccaccgcgcccagccaaaaagcagtcttaaaggtttttgtttatatttgttgctgttacagtacttgaatatagttaataagagcttagaaatttatttctcagctacttttagctttcagttttatattaattgtataagacataataaaatcccacctaagcagatcttgttctgtcatgacttatttttgggacataatcattttatattattatttttgtagagatgggggtctcactatgttgcccaggatggcttcaaactcctggtctcaagtgatcctcatgccttgccctcctaaagagctgggattacagacatgagccaccatgcctaggtgcatcattttaaaacaatgtcgtcctagctatttttattgggtgtaatatgagtaagtgtttctcatttgtagtataagaaattatcataattcttcagcaataattaaaaaaacatgattactgcagacagtttggaaaatataagcaagcaacctttaccttgtgataacagcttttaacttcttgattgtagtcttctatcaattcttttagatgtgcgtatacatacttataaatatgggataatacagtataactattatttagtatattattaatactttcctatctcattgaatattttcttccacgtttagtttttagcataagtaatatctcatcatatgtaaaataatttatttgaatcagtcattggacttttaggttgctttaaaatttcatataaactctgttatatacatacgggtaatttgaagggtgtatttttaatatttctctcctttttgtgttcttagagaaaaaatagaattattaatataataaacctatacatttaaataatgagtttggtcatctgaacttttaattaattaagttcatgtgtttgtatgtatttattctttttctttaagcaggttggcaacattgtacaagtcacccagccagaaggaatgcacagtactgtttcaaatcaaagtcagtattatttgattagagtgggattttgatattgatgggcggtaattatctaaagagagaatttacaacttgcttctgtcaacttctgtaggcagcaagcatatttgaggacagcttttgatgcttagaacattgtccccaaaatagtagtatatacagaatattgtagtcacaaatggactgaaatttattcttaagagcagaggaaatacttattttggggtagtgtgttccatgccatatgtaatgtcaggatattaaaaatctttaaagtgaaagttgttgaagatttccagaaaagaaaaaatactaacattacttattttggtctgtaggtattatagatctattgtagcaccaaatatagcccactttaagatgttaattcttctgtgaatttacatcatagaacacacattttttggctgaaatatgcatatttatcaatagtgttgagccaaatatatttttggcatctctttttttttgagatggagtctctgcgtcgcccaggctggagtgcagcggtgcaatcttggctcactgcagcctccgccctactggtttaagcaattctcctgcctcagcctccctagtagctgggattataggcgtgtgctaccacgcctggctaatttttgtgtttttagtagagatggggtttcgccatgttggccagactagtctcaaactcctgacctcaagtgatccgcccttctcagccttccaaaattctgggattacaggcgtgagccaccgagcccggctttatctcatttttataacaacaaaaacagaaatagagattctgaaactgaattatccacttagtctttgcagtacccaggtgtacttgaaatatcctagttggggaaaaaaaagagagagagaaatatcatagttggaaaactttagagtatttaattatgaaaataaatctgtaaagtacctaagacttaggttatttccttttacttctaacaaagctatcgtaaagtttgttaggattgacctttagagaacatttttataatgcaatgttatttctgtgcgtgtgtatgcaagggtataaataagtatatataaaatactcttaatatagcccgggctttggcacgtatccatgaggtttattctcttcattcacagtggttgataaatttctatctcaagaactttctttttttttgagacgaagtctcactatttcgcccaggctagagtgcagtggcacaatcttgtctcactgcaacctccgcctcccaggttcaagcgattctcctgcctcagcctccagagtagctgggactagaggtgtgtgccaccatgcccagctaatttttatatttttggtagagataggggtcaccatgttggccaggctggtcttgaactcctgacctcatgatctgcccacctcagcctcccaaagtgctgggattacaggtgtgagccactgcgcctggccctagaataaagtagctttcttattagttacttaaaaatatttctaagatcagtcttcaaatgttcttaaagcatatttgtatatatattttttatctttcagcctcagggatttagagatactgttgttacttctgcatgttcattgcaaacagaaggttccttgagcacccggaaacggtcacgagacccagaggaagaattataacccagaaacaaatctcaaagtgtacaaatttattgatgttgtgaaatcaatgtgtacaagtggacttgttaccttaaagtataaataaacacactatggcatgaatgaatccagatcatatgaagtgaatgggaaaaatacctaaatatgattctgtgaaagtttttctaaagcagtattctgcaattatattttaccctgttttcattttcagtaacattcagtagagatgattattatatttcacaaatgtggaaagctgatctcatgtggccagtctgaatttaccattcatactgttttcacccctttctttcccagttgcctataaaatcttaggaagaaacatatcatattcttattgtgtttttttttttttttttttttttggagatggattctcgctctgtagtccaggctggagtgcaatggcgcaatctctgctcactgcaacctccgcctcccaggttcaagcgattcatctgcctcagcctcccgagtagctggggttacaggcacctgccatcgtgcctggctaattttttgtatttttgtagagacagagttttaccatgttggccaagctggtcttgaactcctgacctcaggtgatctgcctgcccctgcctcccaaagtgctgggattacagtcgtgagccactgtgcccagccatgttctttttaaatgtaaatttgataattctttaaaattacccgcttttataattataaaagagaagccagcaccatgagtcagcatattattctgttcagttttataggtaagatacaaattttaggtgaccaaactgattttagtgacctcaatcctaaaatctaagccatttgtttagcttttaatgacattttataatgttaaagggaggactttggagctgttatctcatctagagattgtttggaacatatgtcttccagaataggttgataagctcacaatcatttattgctacgtttttgtttttgttttgagacaaggtctcactccgtcacccaggctggagtgcagtggcatgatcatagctcactgcagcctcgacctcccgggctcaagcaatcctctcacttcagcctcctgagtagctgggactacagggaggcactaccatgccctgctaatttttggatttttttgtagagacaaggtctcactatgttgcccaggctggtctcaaactcctggtctcaagcgatcctcttgccttgtcttcccaaagtgctgggattacagatgtgagccaccacacctggcctcatttctatattttgaaacacggtatgatccattctagaattctagttgttatgttgacatttttctttgaataatcttaactttgcttaaataaattaaagatttcaattctcgatggtttcaaaatcacctaaaaatattttcacacttggctcttagtacttttcaacttactcacaaaatttactttggttccctgtgggggaaaaaataattaattttgggacagaatctcgctctgtcacccagactgcagtgcagtggcacaatcttggctcaccgcaacctctgcttccagggtttaggcgattcttgtgcctcagcctcccaagtagctgggattacaggcatgcaccaccgtgccaagctaatagtttgtaattttagtagagacaggtttctctatgttggctagggtggtcgcgaactcctggggctcaagtgacccgcccacctctgcctcccaaagtgctggaattaacaggtgtgagactgcgcgcccagccatatttatatatttatttttaaactattattttaggttcaggggtacgtgtgaaggttggttacgtaggtaaactcatgtcacgggtttattgtacagattatttcatcacccaggagttaaactcagtacccaatagttaccttttctgcttctctccttcctcccaccttccacccttaggtagtagaccccagtgtttgtctgttttgttttgttttgttttgttttttaaatgcaagcttgctctgtcacccaggttggagtgcagtggcaggatcttggctcactgcaacttccacctcctgggttcaagcgattatcccgcctcagcctccagagtagctgggattacaggtgcacgccaccacacccagctaattttttggatttttagtagagatggggtttcatcacatccaggctggtctcaaactcctgacctcgtgatccacccacctcagcctcccaaagtgctgggattacaggcatgacccattgtgcctagcctgttttttcttttgtgttcttaagttctcatcatttagctcccacttatgggtgggagacatgcggtacttggttttctgttcttgcattagtttgctgagaataatagcctctagctccatccgtgttcctgcaaaagacatggtcttgttcttttttatgactgcaaaattatttaaataattgaatattaaatattgtagcagcaatattttccaaattttagtgataggtgttacttcctatcccagactaaacagtaaatttataaaattacttcagtgtaattattattttctgcaattgattatatagaatagccatcatttaccaggacttgagagtgaaagcaggcactgctaacaattatgccagtacagaggctataaaccaagactaacttcaaatcacttctctaacatagaatgactaattgtgactatcttttgtggacctcaaagcacattttattgtaattgatgccatcattttaacaaatacccatcattttatattctgtcttctcaaatcataaaatccagaggaggagggtgttataagtgataaatatcagtgttaccaagcatcagatgagatagataaaataatgtaggatctctttttttttttttttgagacagggtcttactctgtcacccagactgcaatgcagtggcacgatcactgctcactgcagccttgacctcccaggctcaagtgatgatctttccacttcagactccttagtagctggaagtacaggcatgcgccaccatgcccagctaatttatttttattttgtagagacagtctcacgatattgcccggtctggtctcaaactcttgggctcaagtgatcctcctgcctcaaccttccagagtgctgggattacagatgtgagccatttggcctggcctccagaatctctttttataaagtaccataacactgtactttattttatttatttatttattttgagacagagtcttgctctgttgcccaggctggagtgcagtggtacagtctcagctcactgcaacctccacctccagggttcacgcgattctcatgccacagcctcctgagttgctgggactacaggcattcacgaccatgcccagctcttttttttttttttttttttttgagatggagtttcgctcttcttgctctgtcacctggtccagagtgcagtggcaccatctcggctcactgaaacctccgcctcctgggttcaggtgattctcctgcctcagcctcctgagtagctggaactacaggcatacaccaccatgcccggctgatttttctatttgtagtagagacagggtttcaccatgttggccaggctgttctcaaactcctgatctcacatgatctgcccatcttgacctcccgaagtgctaggattacaggcatgagctactgcgctgaggccccttagcattttttgttacttggttttaactgaggatatgatagtacacctatgtcccacactttatataggcttgccacctaatgctatgcccgtaaattggttaaagtctcaccttctgcaaaccaatgattgtatccaggtttcatcttgtggttagtttgacaaatcagctcagaagtattttttcttaggaaaaataaattgtatttttagcttcaattttcgggatatgcaacttaaaacatatttatatagttctttattatttatgaaacactttggccaggcacagtgactcacgcctgtaatctcagcactttgggaggccgaggtgggcggatcacctgaggtcaggagttcagcaccagcctggtcaatataatgaaaccccatctctactaaaactacaaaaattagctggacgtggtggcacatgcctgtagtcccagctactcgggaggctgaggcaggagaatcgcttgaacctgggaggcagaggttgcagtgagctgagatcaggccactgaactccagcctgggtgacagagcgagactccatctcaaaaagaaaaaaaaaaaacacttacacatcattttatttgatccttctagcagctctgtaaggtggatgtgataggctagcctgtctgcttttcatctttccttccttccatccatttagtgcctaacacacatttaactactttttgaaacaatatttcaaataagatatagaataaattctgtgtttttttcttttttctgttttttttttgtgtgtgtgtgaccctgacatgatatgaacaaattctgtttttcaaatggtcagatgaaaatactatttggtcatgactaggatggtgtttatgagcctgtttgattacaaatataaaattaatagtttcttggttttatgtttacttttttaatatggtaaaatagctatacataaaatttgccattttaaccatttgtaaatatacatttaaatggcaataattacattcgcaatgttgtgcagtcatcaccactaatttctaaaacttcatcaccccagacaaaaactccccattctacactctccccagctcttgataatctttaatctactttgtttctctgaatttgcccactgtaaatatatgtgaaattatactatatatgtatatgtatgtgtatatatatgtgtgcgtgtgtgtatatatgtgtgtgtatatatgtgtatatatatctttatatatatgtctgtgtgtgtgtatatatatgcatatatatatatgttgtttttttttcctggagacagagtttcactcttgttgcccaggctggagtgcaacggcgccatcttggctcactgcaacctccgcctcccgggttcaagcgattctcctgcctcagcctcccaagtagctgggattacaggcatgcgccaccacgcctggctaattttttttgtatttttggtagagacagggtt[146 bp omitted]atacaggccttgaactcctgcactcaaggcctcctccctcttcagccacccaagttgcttggtctacaggtccatgccaccatgtccggctaacactgttctttttatgtctcaattatttcacttagcataatgctggttttcttttttgttttttgggtttttctttttctttttcttttcttttctttttttttttttttttttttttgaagcagggtcttgctctgtctcccaggctggagtgcagtggtgtgatactggctcactgcaacctctgcctcctgggctcaagcgattctcctgcctcatccacccgcgtagctgggtctacaggtgcaggccaccgcacccagctaatttttgtaccttttgtacagacggggtttcccatgttgcctaggctggtctttaactcctaaattcagttgatctgcctgcttcagcttaccaaagtgctgggattgtaggcataagccaccacacctggccttagcataatgtttataagatttatccatattgtagcatatataagaacttcatttatttttattgctaaataatattccattgcatgtatatatcacggtagtccccctttaaccaaggggaatacactctaagaccccccagtggatacctgaaaccaaaggtagtaccacacctctatatatatgatgcatgaatttttttcttcacaatttcatggatagaagactcttttttttgttgttgttgttcatttgtttgtttttttgagacggagtctcgctctgttgcccaggctggagtgcagtggcgcgatctcagctcactgcaagctccgcctcccgggttcacaccattctcctgcctcagtctcccgagtagctgggactacaggcacccgccaccacgcccggctaatttttttgtatttttagtagagatggggtttcaccat[135 bp omitted]gagtttcactctctctctcgcccaggttggagtgcagtggtgtgatcttggctcgctgagacctccacctccccggttcaagcgattctcctgtctcagcctcccaagtagctgggattacaggtgtgtgcaaccacacccagctcatttttgtatttttagtagagacatggttttaccatgttggccaggctggtcttcaactcctgacctcaggtgattcacttgcctcagtctcccaaagtgctgggattacagacgtgagccactgcgcccggccagaagactcgttcttaccatagctcttagcaatgttggcataacttttttattaaatctacaattttcaccttttcactaaaaagaagaaatttatggcttctctttagcatatcctaatcgccagcatcactactcttgcaatttggcaccattattaagtaaaataaggcctatttaaactgaaacactgctataccaacacctgacagttgatctgataaccgagccaggtattaagtgactaacggagcaggtagcatatacagagggatgattcatgttccaggcaggacagagcaggatagtgcaagatttcatcatgctactcagaatattgcacaatttacaacttacgaattgtttatttctggaattctccattgaatatttttagacatcagttgacctcaggtaactgaaaccatggaaagtgaaatcacgggtaaggagagactactactgtacattttgtttatccattcatctgttaatgcacgtgtccccaacccccagggcacggactgatgctggtctgtggcctattagaaactgggttgcagagcaggaggtgagttctgagggagagagcaaagcttcatcagtatttatagccgcccttcattgctcaagctctgcctcctgtcatattagcagtggcattagattctcatagcccgaaccgtatcgtgaactgtgcatacaaggaatctaggttgcatgctccttatgataatctaatgcctgatgatctgtgactgtctcccatcaccccaagatgtgtccatctggttgcaggaaaataagttcagggctcccactgattgttgtgtaattatttcattatatattacaatttaataatagaaataaagtgcacactaaatgtaatgtgcttgaatcatcccaaaagtatcccccctgcccctcgtccgtggaaaaattatcttccatgaaaccagtccctgatgccaaaaacgttggggaccgttgtgttaatggacatttggtggacatttagattggttttgttttgttttgtttttgagacagagttttgctcttttgcccaggctggagtgcagtggcgcgatcttggctcactgcaacgtccgcctcccaggttcaagcaattctcctgcctcaccctcctgagtagctgggattacaggcgcccaccaccatgcctggctaatttttgtatttttagtagagatggggttt[142 bp omitted]caggctggagtgcagtggcacaaccgtggcgcacaaccgtggctcattgcagcctcccaggctcaggtaatcctcccacctcagcctcccaagtagttgggactacaggcacatgccactatatccggctaatttttgtattctttatagagatggggttccatcatgttgcccaggttggtatcgaactcctgggctcaagcgatgccaccacctgggcctcccaaagtgctgggattacagacatgagtcaccaggctggagtgcaatagtgtgatcctagctcactgcaaccttcaattcttgggctcaagccctcctcccacagtagcctcccaaatgcacatcaccacacctgtttttgttttgttttgttttgttttgttttgagacagagtctcggtctgtcgcccaggctggagtacagtggcacaatcttgagtcactgcaacctccacttcccaggttaaagcaattctcctgcctcagcctccagagtagctgggactacaggtgcccgccgtcatgctcggctaatttttgtattttaagtagagacggggtttcaccaggctggtctcaaactcctgaccttaggtgatctcgtgatctgcccaccttggccttctaaagtgctaggattacaggtgtgagtgagccaccgttctcggcacccccccttttttttttttttttttttttggagacagaatcttactctgtcacccaggctggagtgcagtggctcgatcttagctcactgcaacctctacctctcgggctcaagtggttctcatgcctcagcctcctgtgtagctgggattacaggcatgcaccaccacacccagctattttttgtatttttagtagagatggggtttcaccatattggctaggctgattttgaactcctgacctcaagtgatcccccaccttggcctcccaaagtgctggaattacagtcatgagccactgcacttggctcgtatattagctattcttatttttctctctacagtattttacttttcttgttgataaccttcttactaaactgtttgcaactagtgataaaattacaatataatgtggtagaaagaacatgagactagagttggaagatgtgcattttagttgcatgtgagatgttaccaagccatgtcagttttggcacctttattttctcatatctttaccttatttctcaaagaaggtaagactaaatgattgctaaattcattggtctaaattttatgggttttgcttttgtagaggcaatattaaatattcactttaaatgatcaatactggaaacatggaaaggagtgacatttatacacttttattttcaaaatcaataatattagggatcccaatacaatacattgcatttcagttttgagactaatgttgaaatgtcatattgctttaaaaaataaaacaacaacattcagttgaagaagagaggctggctgttcataatatgtatttttagttaacgtcagtgcctaaatttactgttactgttaaaatttacagaacattttgctccctcaaaactgattttggcataaaatatgttgacaagattttatgtatttttgaccacagtatattcctttgcttgttttcagtttttgtgtaccattgatatctgatgatgtccttttatgtttcaactatccatttgactcccattatgtgtagttaagatgtaagtttttagctaccgtgactctgagagtgattttatgtgaagtttattttatgatgatttaaaagttgggctcacgtcagaagggcttgtgaaattacagaaattatgtcctactcactttgaaaataaaaaattaacacaagataaaagacaaaagctgaggagccaattaattagaatttgtatcaggaattcttacaaaccaatgcaaagaagaaaaaattggttatagaatagtcttggcctaacgataggaagtatatcagtttttcaagagaaaaggtgttttctggctgttgttttttatttgtgttttaattaaatttttttcctaagtaatatttgtacaggatttaaatttaaaaagcacaggatttaaaattcaatgaaaagtatgtttc[138 bp omitted]ctcccaggttcacgccattctcctgcctcagcctcccgagtagctgggactacaggtgcacaccaccatgcccggctaatttttttgtattttcagtagagaaagtgtt[142 bp omitted]ttttttatatgacctcccagagctattctatgtatctaaaatataaatacattttttcttcaatactcaaataagatacacagtgttctgcaactagtttttgtatcagtacatgtagaattttctcaaataaaaaactgctggtcaggcaaggtggctcatgcctgtattcccaacactttgggaggaggcatgggaagatctcttaagcccaggagttgagactagcctgggcaatatagggagacttcatctctagaaaaaataattttaaacaattaaccagcatagtggcctacatctcttgtcccagctatttaggaaaggagttccaggctgcagtgagctatgtatgattgggctactggactctggcctgtctctctaaaaataaataaataattgcatatgccattccattgaattaatatcctattattattatttttatttatttatttattttttgagacggagtctcactctgtcgcccaggctggagtgcagtggcgtgatctcggctcactgcaagccccgcctcccaggttcacgcccttcttcttcctc[214 bp omitted]gactggagtgcagtggtacaatcatagctcactgcagcctcaatctcccaggttcaagcaatcctcccgccttagcctcttgaatagctgggactacaggcatgtacctccatgcccagctaattattttattttttgtagagacggggtttcactttgttgcccaggccggtctcgaacccctgggctcatgtgatcttcccacttcggcctcccaaagtgctgggattacaggcatgagcccgctgtgcctggctgccattaaatatttaaatcgtaatgaactcctctggttctatgcataccaattatcaaccagttgataactggatttccccagatactttgggtatagccagatcaatgcaaatgtctggtctccttggaattaatagttctcactgtaaattcatatattgttattgtgattttgatatactctcgcgagatttacattagttaatatccctccatttgattaaatttggagcactcatttctgagcctccaagttcaagttgctgaactttgtcataaattcatgaaggtaaatgtcattatggtaatttaaaacaaattatttgacacttttcccatctggaggtggggtgtattatgtccccttctcttgaatctaaaatgggcctcttactgctttgaccaatagagcaccataaaagtaatgctattgacatatgagactaggtcatgaaaggctacgcatcttcttaggcactagaacactcactcttgaagctctaaattactatataagaagtctgactaccctaggccgtgcacggtggctcacgcttgtaatcccagcactttgggaggtcgaggcaggcagatcacgaggtcaggagttcgagaccagcctggccaacatggtgaaacctcatctttactaaaaatacaaaaattagccgggcttggtggtgggcacctgtaatcccagctactcaggaggctgaggcagaagaatcgcttgaacccgggaggtggatgttgcagtgagctaagatcgcgccgctgcactccagcctgggcaacagggcaagactctgtctccaaaaataaaaataaaaaagtctgactatcctaaagccatcatgctggaggtgttatgtgtaggcattacagttgacagccctagctgaactaacgctcagcaaccagcatcaatggccagtttggcaacacaaattagtatcttgaaaaatatttacatattaatcatttctcaactctatttttttcagtataaatggaaaggtataatgtaagtcatcttggacatctagcccagttgagccttcagatactctccccaactgttaccttattgccgcttcctcagaccttcaagtgaaaaccacctagcttgagtccagtcaacctacagagctgtgagatatagttaaatggtttttcttctagccactaagttttgggatagtttgttttatagcaacagataagtgaaacagctgcctgacagcctctctgggtgggttaccagatattcccaagttgtgtctttaggtgccttcttagaatttcagatcttcctgtccagtgtcttttagctttttctgttcatcttcatttctactaacaccattcttttctgtactcttattatctcccattgcccaactgattccagccttcaatctctcttcttcaatccatcctgcattcatctgaaagaatgtctgcatattaaattttcttaaaacacagttttggttgtatttctttctaaattcagtatttttgtcaatacttagaataaataactgcaattccatatcccactacagcctagatctaatcttgaactttttcccataggctttataaccttaaagagtcatgaaattattggcatgtatttccagctatacaaatttccagaattttatatgacaatttaaaaggatattttataaattaataatttcatgtgtgaaggactcaagttcagtttgcatatgtattttgatttgctgcctttgtgcaaataactgcaatgtattgtattattacttaggtatatggaggttcatcaaatcttaatcttcagcttgcagaattactggaaaccatgtgtgtgctatattggtgccagatatgtcatttatagatcactctttcataaggcagcaaactacttcctatgcccaaatcattttctttctggaaaagatacattttgtcagcatggttaccatgtgtggtaattgataatgtctgtgccacatggcttacttctacccttgtccgacacagctattctaccacctatgattaccatatgctacagcactctgggttaatggaatcatttccatcttcccttctagtcacaaatgtcattgtggctcaattccatcagctcaactaagaataaaatattcagtactatctaagcaaagaacacacctttgtgaagttttcatatttagttgactgtttcattttcatttttaaaagctaggtttttttgatgaatgttccagagtgaggaatgggcatctgctaactagaataggacatgatcaatgtcactctgaattcttgcatgtatttattttaaataaatatacaaaggtaattaaaaattagatgataataaaggtaaagtttttaccaccataaagcatttttttgtaaagtgaaaactagtagcaaaagattgaagtggatttttaaaacagtgtcaatttattttagaagaaccatttattatagaaggaacataccacatgttagccatttatagcaccatcatcaaattactatcaaccactgccctcttcttcttttgtaagtatgtcataataaataattttggttcctcaaagaaccatgctagataaaaagaaagattgttattaatggtttaaacaagaaaaaaggttagaatctgttttggggatttacttctttgctttttaaaactagtaaaatacagtgcatgtgggccagttattacctgatgtgaattttaattttgacagctttgaattattgctgcaatatgaccatattagccagcaacagaaaaggaataaaaaattattatagcagtagtatttttggcagcaaatgggaatgatttttatattattgatctgggatgtagaagaggaagaagtttctatttgaaaatgtttctatgttgctcagttttttcagttgtcaggtgttctgttgcttcctactagtcaatttgacaacatagtcaaattaatattttaaaaactattggccaggtgtggtggctcaggcctgtaatcccagtactttgggaggc[134 bp omitted]gaggttgcagtgagctgagatcgcgccattgcactccagcctaggtgacaaagtgagactctgtctcaaaaaaaaaaacaaaactatttatatcaagcctgtctaacctgtggcccatgggccacatgcagcccaggacggctttgaatgcagcccaacacaaattcataaactttcttgaaacattatgaggtttatgcatggacttttttttttttttttagctcatcagctatcattagtatcttttatgtgtggcccaaggcaattcttcttccaatgtggcctggggaaaccaaaagattggacacccctgatttacatattagttatccttccattcagtttttaaaatataaatttaaaatatacattttaatatttgcaacttaatatttatcattaggcctagccttaaacatttacataagcattaattttaggccatgggatatgagctatatataatttgttattatactctctccaaaatataaaatgccaatattttatgttaacataaactatgttttactatttgagatattatattagcttcaaatcaatggttttttacaactagcaaatcaaaattgagggttttctggaaatagtgtttctaattctgcctatagataaaagaggcatactttagaatagacagaatattccagacttgcataatcaagccaatttttttcctgagacagggtcttgctctgtggcccaggctggagtgcagtggtgtgaacatggctcactgcagccttcatctcccagactgaagtgatcctcctacctcaacctcccaagtagctgggactacaggcatgtgccactatgcttgactaattttgtttattttttgtagaggtgaggtctcactgtgttgcccaggctggtctcaaactcctgggctcaagtgatccttccaccttggcctcccaaagtgctgggattacaggcatgagtgagccactgtgcctggccccaagctaatattaattgaagataaactgagaagttatagactgtttttttaaatcagctttgatagacttcttagttataagcatcaattgtttatatatcaaatattttattaacttacagaaattaatcgactttttagagcagtttcaggcttacagaaaagtagaaaggacagttccaatatatgccctctcccctcacttacatgttttctcctattattaacattttgcattattgtggtacactagttacaattgataagccaatattgatgcactattattaactaaagtcaatagtttacagtagggttcactcttgaacattccatgggttttgataaatgtataaggatatgtagctaccattacagtatcatacagaatagttttcactgccctaaaaatcccctgtgctctacctattcattcttccctccctcccccagaacccctggcaagctattcttctaattccaggaaatcatttactgctaatgtcaagtaaactcagtttactttggagacctaaacttgctttaacttaactaatttatagttcttttatatatacaatccattttattccttaaagtattatttgttactatgtcagtcaggatctagttaaggaaaaagagaatggggtgtagtggctcatgcctgtaaccccagcattttgggaggccgaggtgggcggatcatgaggctaggagatggagaccatcctagccaacatggtgaaaccacatctctactaaaaatacgaaaattagctgggcttggtggcacgtgcctgtaatcccagtacttggtagtctgaggcaggagaatcacttgaaccagggagtcagaggttgcagtgagctgggatcacaccactgcactccagcctggcaacagaatgagactccgtctcaaaaaacaaaaacaaaaacaaaacagagaatccaggaaattggttacacaaattatggaagagctaaaaagccaaaaaggaaagattcacttctctaagtcctaaaagattagaaagctgaaagcttctaccatccctaggctaaaggacaaatgggggaagatgttgttctggagctgaggggatagggtcactggcaaaagctagagaatcccagtgaacatattcatggggaggaaagctacaaaggaaatgcatcaggcctcaggactgagctagggaacagggcttttcttctttcctcccttcttccaatttcttgtcagtgcctaccactggacaaatcccaggtgaaagtcagctgtcacagtagcctagtgaatacagcctgaaagggtcagccctcctacaatacagagcagggcaaaggaggagaaagaataggtatgagggcaaaatggacaaggactgacacagtaatcaattctttttaactttaaaaatcaactttattgaggtgtaatttatatacaatttatatacaatttatatacaatttatatacttattttaaatgcagacttggataattttttttttgagatggattctgctatgttgcccaggctggagtgcagtggctattcacaggtgcaatcatattacactgtagccttgaactcctaggctcaaacgatcctcttgcctcagcctccagagtagctgggactataagcacatgccaccctgcctggcaataatttttggcaaatgagtacacccatatgaccaatcagtcaagatacagaacattttaatcacttcacaaagttcctgcttactcctttgctacaaatctcccaccccatcccagtcccaggccaccaggaatctgctttctctcactatataggttaattttgcctgtttgggaattttatacaaatggaaatatattatgtactcttttgtgcctggatttttttttttggctcagtatatttttgaaattcatccatgttgtgtttatcagcagttcatttatttttattgctgagtagtattccattgtatgaatacactactttatctgttcatttgttgatggacatctgggttgcttccaggtttgagctgttatgaatgaaacttatgtgaacagttatgtacaagtttttttgtgtttggggtgtgtgcaagtgcatgtgtgtttggtggacatgttttatttctcatgaataaaatacctgggagaggaattgctgggtcatgtaagaaactgccaaactcaacaattctttttaaccttataaatgtcattactatgaatgtccacaaaaggacattgtacatttcctccaaagagcaaagggttagagggagaataatttttatgagaaaaactttaaaaatttgataccttaaaaatacgttaaacttttcataacaatattttttttcctttttattttttatttatttattttttttctgagacggagtctcgctccgtcacccagactggagtgcagtggcgcgatcttggctcactgcaagctccgcctcccgggttcacgccattctcctgcctcagcctcccaagtagctgggactacaggcgcccgccac[175 bp omitted]ggtttttctt[131 bp omitted]aagtgtaataagaaaggagttgaaaaagagagcaaactaatgcaaaataattactaaagacttcttgacaatggcaaaatcatcctacacagctgctctgagatctcagcacttgctgtcagctaccttctggcaaagctactttgtcaaatggatgcaataggatccatattgatctttgtgaaggaatatctttattaatataagcaaacacgcctctcacttatagtaatgtagaggtgtgggctttttcttttagtagtattgtttccccaacatatatcactttcctttgaaatgtgggctgagtcataaattaatgtcacaaatgagggaggcaactatgttacaaagtaggaaggcgtagatatgaattgttacagttgacagctaagtactcttgaactaaatgtcattatgtcaaattctgagatattaaacaattgttgaaatgtaaaattgtggacatttaggtttgcagcctaaaaagttttgtcaatcttttctagacattctgaaatggaaatgaacaggtggattgaaaacaaagacaaatgaggagtttaaagactttcttggcacctcatagagaagttgctctacgctggttatgttttaaacaaaacacatataaatacattcagcatttctggaaacagatttattagatctttccatttacctttgggaaaaaaatatagaggactcaaggcaattattcactatattctttctatcatgtattatttaatctcaagctaggagaggaactctgttttacatgatgccataatgtacattagtgagctcaacccacttaatcttaaaataacagtatcaggtcagggatttagaatacagtattatatgaaaacagttggcagagagactccctcttctgccattaataactggaaacgatatttcagaccctaaatccaactgaaacccagaaacaatacatggagaggatggggtggataatttgtgagaacatgtttttcaaagtagagaaagaatcactatgtttttgctgaattatatgttgccatggacatggcagtttgcagtaatgatgctatcatctatacagctgtataacaacacagcttctttctctcccactccttcagtaaggcttaaaaataataggtttgtgtgtagtttggtaagaaaattagaatcacttaaagtcatttcaattccaacccaagaaagaaaaaaagagacttggggggatgg[139 bp omitted]atggtgaaaccctgtctctactaaaaagacaaaaaaattagccgggcgtggtggcacatgcctgtaatcccagctactcaggagggtgagacaggagaatcgcttgaacccaggaggcagaggttgcagtgagccgagatcctgccattgcactacagcctgggcaacaagagcaaaactccgtctcaaaaaaaaaagaaagagaaaagaaaaaatacatattatataatgaagtataatatgcattatgcagagactaaagaggggagtcttggttgcctgaaaactaatgggtaaaatccattgaagtgggtgaatccagtgaaaagacctggattgagtccttgttgcatcccttgcatgtgaccttgagcaaagtcaccatgtctttaaggctgttttctcacctataaaatggaataattggccggcgtggtgggtcacacctgtaatcccagcactttgggaggctg[133 bp omitted]tgacgcaggagaatcacttgaacccgagaggcggaggttgcagtgagctgagatcgcgccactgcactccagcctgggtgacaagagcgagattgtctcaaaaaaaaaaaaatcataacggtaacgtcctatacctcaagggactgtggtaagaattaaaagggtgaaatcaatgtgtaaactatgaagcccaatagaaataaggtgttatacagacaattgcactattgaatctccggagacagagttgagttaaggaaaaatgcactttcggaaagctttggcgactgaacgacctgagttctccaacgccaaggctggaagtttggagaccttgaaacaagtaaattaccattaatatcataattttcagtttccttttaagaaatgagagtaacaccactttcttcacagaatcaagtgagagagaacctatgcaaaggaacttatcacttggtaggtatttgaagctccctctgcctgaaaactacttattcaaagactgcaacaaaaggtgttcacagtgtggtatctttcaaaacatacgctaaggcaaggaacagataaggaaatggaagtacatccaattgggatccaagcaacccaagtgggaaccaacagctagacttggagatgtcttagctcactcttaaccacgtgagggtagggtatccaaccaataaagacattcagagttggagagcgggcgagtggagtgtcctttagactccgcggactcgacgggagggaccctgcaatgcttaattagaaccggttgccatggcgacagtctctaggcagcgtgggctgagctctccgtaggaataaagggtgggccgccgctggaccctgcgcgcgcccgccaccaactttccctccagatccgagaggggcggcgcgctccgcccccgggccgcgcacgtcggtgctcggcggcgcgcacgcctgcgggagccctctccaggcaacctagtgctgatcgctcgtgccggtgcggccgttaaccgcccttgccggagccctaggctcaaaagcagccccttacccttcctgggcttcccccaacccctttcccggtctgccctggggcatgagcagcgatggccggctgcatccctgaggagaaaacttaccggcgcttcctggagctattcctgggcgagtttcgcggaccgtgcggcggcggcgagccggagccggaacccgaacccgaacccgaacccgaacccgagtccgagcccgagcccgaacctgaactggtagaagctgaggcggccgaggcttcggtagaggaacccggggaggaggcggccacggtagccgcgacggaggagggggaccaggagcaagacccggagcccgaggaggaggcggcggttgagggtgaggaggaggaggagggcgcggcgacggcggcggcagccccggggcactcggccgtgccgccgccgccgccccagctgccgcctttgcccccgctcccgcgaccgctgtcagagcgcatcacccgcgaggaggtggagggcgaaagcctggacctgtgcctgcagcagctctacaaatagttaagtagctgggcttggctggtggtgggcccgcggtccccaccgcgccggcctcggacgcggctccctcggcccctcaaactgctctcttttctgctcctctcccccgcacccgcgcctgccgccgctgaaagcgcccccgctgctcggacccgggcggtcggctgagagctgcccacgcccgcctcggcccccacgcccgcctcggcccccacgcctcctacccggccttgaagccgctctcctgagccccggcgccctcccgccgggcccgggcccctcatcccctttcacctcggcccccagcttctagctccacttcacgcaacctttccctttcctgcctggaaaggtccttcctcccaggcttgagctccctcttcttcccagatcccttctttctccgggaggtttcctcccaccccagtctgtcttttcccgggctgagtgccttgttgtttggcggcagagacgcgactcctttctagactgagctgcgaggtgcctcctgcgtaactgcaacaatgatggttataccggccccgtatccagatgagagaatggagtagattttccgtcaggtgctcagtgttgaaagtgaagggctttttagatgttttcacacagggaagcctagtctcttagtttagacatttgacattccataattgagggaagtgggaaggaattgagagggaagggtaagcaaaattttgcaagcaagccttcgggtgaaagagccataattcattaaagtggaaaagtcaggctgttttgattaaattgcaattaggtgcagtattttcagtccattaagtagatgggatggggtggggagaaagcagatggcttagctacacagatgaaagtctaaaatagaaaggtcaaggctttgcctttcatcccagttctggtttttataggcctgaaatagaaacggtttacaattgcgtttctcaatggaattgttccgaaataatgacagaggagaatactagtaagtctctgaaaacattggtaaacctgggaagtcttttgccattcagctgatagttgtaatgaaaggtgttactctggccacccaaaaagtttactactgcaagattcgctgtaattaagttcaaactcacttttgggattttctcaaaagcctaaagaaaagaagggcctggaaagtaaacctgttttgtcttcatccaagctaatagacacctgatcagatcattctcctgttaaagcagcagtttatcaataggggaaaatcatttaacaaatcttccatagaagtggactgtgttggtatttcataatataagctatctaaaatttaattttaaaatactgttcaattacagtattaccgtcaattagcaaggtaatgatgctttttgagaaacgtaaaatataaaatggcgtgtaataccaccacccagagataaacagtattaacattttagagtatatctggtctttgtgaactatcatagacaagggcttctgagatgtaattttttacagtatttaaagataaagctccctgcttaaaataaaatggaaatgtttattaagggaatttatcttagcagcagactggctctatcttgacagttaattcttacctttacaaatgcagtttgcagaattaaaccaattcaaactttagaaagtgtccaaataaggtcattattttagtacaaccctgaacatttgccatgtaagaaggttttttttttttaacttatttaaagatgatggcaagaagatgtgtgttttttcatatagaagcggccaggagcggtagctcactcccgtaatcccagctctttgggaggccggggtggcagatcatgaggtcaggagttcgagaccagcctgaccaacgtggtgaaactgcgtctctactaaaaatacaaaaattagctgggcgtggtgtcgcgcgcctgtaatcccagatactcaggaggctgaggcaggagaatcgcttgaacccgagaggcagaggttgcagtgagctgagattgtgccagtgcactccagcctgggtgacagagcaagactccgtctcaaaaaaaaaaaaaaagattaattttgatataggtataaactagaaaaaactgaaatgataaaatggccatctagttgagaacagaagtttggatttgaaataaaactagcaaaattaaagttggaaaatatttccgcttaaatcagagatttcatcatttatattgtgttttgtacagaagttgttaatgtatttttattcagatataaaatggctggcttgttcatgtaaagtatctttaaggtccttaacaggtttaaaaacagtttttgccgggcacagtggctcatgcctgtaatcctagcagtttgggaggctgaggtgggcggaacacctgtttgagaccatcttgtccaacatggcaaaaccccgtctctactaaaaacacaataattagccgggcatggtggtgcatgcctgtaatcccagctactcaaaaggctgagccacaagaatcgcttgaacccaggaggcggaggttgcagtgagccaagatcctactgctgtccattccagcctgggtgacagaacaagaccttgtccgcccaccttccactcccccaccaaaataaaacaaaaaataaaaacacacttagctgggcatggtggtgtgaacctgtagtcccagctacttgggaggctgaagtgggaggctttcctgagcacaggaggccgaggctgcagtgagccactgtactccagcctgagtgacagtgagacgttgtctcaaaaaaaaaagttacctacgttttactcctttctctaagtttaaatcccccaagagattaaaataatttcaatgacaatctgagaatttctgaggttaaggagaggctgccctttgaaaaggtggaggtgagagattttataactgagataatttgtaaataagggtataactgatcttacaggagatgtgaatataaggctatctgtgtagtttatatgggtcaatattttgtatttaatttctctatacactactagagataacatatatttgttttaatccagaagaagcaaatattctgaagtcttttttctttccattttttaccagtagactattaaacgaagataaagtcattattagagctatattgtcatcatattttcagaacagttgtttcctcagttattcatttagtctgggttggacttcccaagggggaaaccaatatcccaagagtctggcacagttaagtagttccagatggcttgcagtaataatgagggtggacactttaaaaatggcttggaaaagaaaatcgctggttatagacactaataattcagttacattgaattgtgtgaatcattaatgactttggattaggtcagaaaatcattaaactttatctaatttacaaatatataaatggaaaaatatatggattcatgttatataataccaatttttaagttgcacatttttttctcattcaaaaataataaacgttcacatttattaaataaagaagtggagaacattcacataagcaaaaagaggaaaaataccattcattgttaatcatgctttccaggtttttctcctgcttctcaggctatcccacttcttctctgtgagcttttaatattctgcctacccctttaatattggtgttctgtccttgaccttcttttgtctggttgacttatttgtccctagtcaatatcaatctgtcacatgacttcagttattgtagttatgctaaaggctcccaactctatctccatcctttctttgactgctagaacagctttacctagatgtcaaaatttcctcagattaaactgtctaaaacagaattcagtcctccaaccctctttacggcccccaaaacaaacaaaaccaaaacctgatactctttctggtgggtccatccctgacttctcctttccctgacttctcctttcacctctcacattcagtcacatcttgttaattctacctcgtaaatacctcttaaatatgtctttcttcattcccactgtcattgtcatctcttgccagtcttacccttctgcaatatattttccccagtgtagccaaaatgtttaattgtcacactgcttaaacatttttaccctttacccagagttagccaaactctaaggttaagggcacagtcttctactctgccaagtctgctcaagacttctgatcctattgtaaggggttagggtgcaactacaaatttcaaatgaagatgctatgcaaaacctcacttctaacatcaactgcaagtttgggggtttccccaaaccaccctcagattcagtaatgcactagaaaaactcatagaactcactgaaagctattatacttagagatacagttcattacaaagacaagctacaaattagtcaaaggaagagagatgcctagggtatagtctaagagggttgcagatatgaaacttccattgttctcagggaatataccttccataccctcccagcatgaatgtgtggatgtatggaaatacacacaaggtattgcccacccaagaagttcacctaaactttagtgtgtctggagtttgtgttttgttttttaaagagatggggtctcactatattccctacgctggattcaaactcctggctcaaatgatcttcttacctcagcagagttttcattgagatttattgattgtttgcatggttgaactcagtttccagtctcccctctccagaggttaggctgatactatgtggttcaagggacccatcatgaatagtaagaatactcatattactccagaaattccaggggcttagaggttacctcccaggagctgggggcaacatctggacctctctttggacaagttttttactccacatccttcatcacctatctctcttttgccctctagataaaatccaaaggtaagggcttataatcttacttcattagttttatttctggaatcactatccacccacttcatcccagctctacccctccagaaactacacttcagctatattaaactaatgtatttctttgaaggtattgtgttatcttttgcctctgcacctttgcacatagtatatttttccctctgcttggaatactatgttcccccaatagccactcccaacacaatccaatttcttacccgttttttagttctctgtttaacacctcttccttgaggaagcctttgcttaccgtcctcacactcatcatgagttaggggtcccttctacgttcctttccataatacccaatgccattcctcttgtaagtacttggtttaatttattattttttgtcagcaaatatttatatctccgtcactagaccagaggtctccaaagtcaattgcacctaaaatacttcatttcggcaaaggaagaaaacattatcatctgtttatttgtgtataacatacgaaattaagtgctataaatatttgacatgtttattgagattggcaacttgttctgtatgacgactgatttcatgtgaagcatggtaagtgtggtattctgagggagtgcaaattccacagcttatgggggttgaccgtggcatcctttctccaatttttaggccattacaaactattacagtttatctgtgcctgagtaaatagatttatggattatatttcctggttttaacaaaattagccctcatgaaatggaaaattggctttaaaagttcctgtgaagatggctgggcttggtggctcattcctgtaatcccaacactttgggaggctgaggcaggcagattgcttgagtcttggagttcgagaccagactgggcaacatggcaaggccccgtctctacaaaacttagttcagctactcaggaggctgagatgggaggactgcttgagcccaggaggttgaggttgcagtgaaccatgatcatgtcactgcactccagcctgggtaacagagtgagaccttgtttcaaaaaaaaaaagtttctatgacaaaatcatgagttaaacataatattgataatgcaagtgtaagaaacataaaagttaagagcttatagttctctcacgcttactacatat[180 bp omitted]cgggcatagtggcgggcgcctgtagtcccagctacttgggaggctgaggc[138 bp omitted]gaggttaaacttaaaacaaaattcatgttgatccatgtagatctagttctttcattgtagctactgtatatcattctatagtatgattatactatgatttatccaatctcctattgatggacatgtcagttgtttttaatttttacacatatattaagttaatactgactgctctaatggatacatccccaaatctcaaaggcttaacataatgttagtttatttcttgcttatatagagttccttcagtggagaaggaggagctgtgttctgtgaagtcattaaggaacccaggctgatggagactctgtcctttttaacctgtggtttccaacgttgctctaggcatcaacatttatccagcaaatataagggagtagagaatggtgtttgaggtttttaagggccagtccttagaagtggcatatatcacttctgttcattttccattggctagaattcaagtcatatgacaccacctgggacctacatttcctaaaaaagggggctgggaaataaattgctggcttggcagttaattccaagaaacaactctacactatggacaaagagtacaaaatcttggtgggtagcttggtggctcctgccctacagataatgctagtttggacatgtctccttgtgcatatgttcctaggtttcttgggtatgtttctagaagtggaaatgtcagattgatataagtacattttaaatttattaggtattgccaaattgttttgtccagcagtactgtatgaggagtctgatttctctacgttcttgctaccatttgaactgccataccgtgaagcttgtattttaacacagttgtgttccattattgctactgaaccatgtaggaaagaatgcttatagctgaatatgatcttgatttagggcattttagaagagggcattatgattccataatgatttataagatcactaaagaaacattaccattgttgtcttttatggatgcctaaaagtctaaactgcctaaagtccaataggaatataatatgagccacatatagtttaaaattttctattaaccacctttttaaaattaaaaagaaacaggtgaatttagttaaaaaaacttattttaactcaatatatccaaaatattactatttcaacatgtaatccatattaagatattattaataaaatattttatatttttataccaagtttttaaaatcctgtgtgtactttacacttacagtacatcccaatttggagtatcacatttcaaatacttaataattatatggggctaatggctaccataacaaacaattttgttttagatttgctattttttaaaaaaaccacaactacaacaacaaaaactttaattctgtaacacatatctaaccatttttaattaatatttaaaattaatgaggaaatataacatttcatattaaattagagactggcatttcatattgacattagagccacttagctgggtgcagtgcctcacccttgtagtaccagcactttgggagccagcctgttgcccaagctggagtgcagtggcgtgaacacacctcactgcagcctcaaacttctgggctcaaggggtcatcctgcctcagcctctcaagtagttggcagtacaggcatgtgccgtcatgcctggctagtttcttctcttttggtttgttttttttgtttttgaaacagagtctcgctctgtcacccgggctggagtgtagtggctcaatcatggctcattgcatccttgacttcccaagctcccaagtagctgggactacaagcacatgccaccatgctcggctaatttttatattttttgtagagatgaggtttcgccatgttagccaggctggtttcaaactcctggcctcaagtaatccatccacctcagcctcccaaagtgctggaattgcaggtgtgagccaccatgcccagcctactagttgttttctttccaggtttgtataggcctattatcatcatcatctttctctttattattattttccttttctgctctcccatgaaaggtagaggataagggaagaaaaagaagaaagtattccattcccacatccctttaggttggcttcttattttatgtttttgttggtgtgtgtttattttgctttgttaacattttcaactagctatagaaacgtttgcaattcttattactgattagcattccaaaactttgtaatgaacatttttctttctttctttttttttttttttttgagacagggtctcgctctgtcaccaagctggagtgcagtgacacgatctcggctcactgcaacttccaacttcctggttcaagtgattcttttgcctcagcctcccgagtagctgggattacaggcacgcatcaccatgcccagctaatttttgtgtttttagtagagacgtagtttcacc[133 bp omitted]attatttgagaatattgtgaacaatgacaagtttgaagtataatactatatgaagagtaatgaactgtttaaaagattgagagtattcttaattcttcatgtatattttcactgaatactctggtgtatagctctgagaaagactagttcattactacctagcgtagtttaagaaaaaaaaagaaccaaaagaataatctcctggttagaagtatgaaagataatttttttcctggtgacttgattccataatgatttataagatcactatagaaacattaccattgttgtcttttatggattaaagtatttgacctgctttttaccacaaagcacaacctctggtctttaatatttttgtagtttctttttttttttttttttttccaagatggtgtctcgttctgttgcccaggctggagtgcagtggcccagtctcggcgcactgcaacctccgcctcccaagttcaagcgattctcctgccttagcctcccaagtagctgggattataggtgtgcactaccacacctggctaatttttgtattttattagaggcagagtttcaccatgttggccaggctggtctggaactcctgacctcaggtcatccaccctacttggcctcccaaagtgctgggattacaggtgtgagccactgcacctggcttatttttgtaatttctgtttttttttttttttttttttttgagatggagtctcgctctgctgcccaggctggagtgcagtggcacgatctcggctcactgcaacctccgcctcccaggttcaagcgattctcctgactcagcctcctgagtagcttggattacaggtgcgggccaccacacctggctaatttttgcatttttagtagagacagggtttcatcatgttggtcaggctggtctcgaactcccgacctcatgttctgtccgcctcagcctcccaaagtgctgggattacaggtgtgagctactgcacccagcctgtaatttcttagtcacatttttctatgttgtgaatctaaatacaaaaactaagatactagtaagcctgtttttttgagaagtatattgtactatatgtgtgtgtatacacacacacacacacacacacacacagtaaaaaatactaaaaggctaaaatgctaaagggcaagaattaggttgtaaacatgttctttatgcaatctaatatgttattacataaatatgagatgacaatcattaaattcagctatcactgattttgcaaaaggaatgatctcttaagttctgagatttgatttctggcaactctgaatatttattagttcaaagtggttcaaggcagcttataaatagttttatttattacttggaaagatattggtcctattattcacaatatacttatatataatcagagaaacaaaaatattttcagctttttcggggtcacatggaaagttaactataatctagaaacaattttcagtgtttcaaaacaaaaacagttttgtgtctaataaaaaccctttgcccaggatattctctcatcttggattgataagtatctttctgtaagagttaacagtgtaaacttgcagagggtcagcattgtctacacccaaaataacaattgtacaagtatgaatagtagacacctgttcctgtttctcttgctgctgtgtactatattcagtgagacctcgtttaggcattgttttatatttattacctcttttaatcatcataaaaatatatgataaagatttttatcattaacctgttttgcagatgaaaaagctgaggcacacagaatttaaagaacaagttttcaccatcagcagtgtcaccaggacattaacctaggcagtcagacttgggagattataattatgatgttcattttatgattctcatgctacattacaaacatttcctacggggaaaaatttcaatgcaaatgtagaaattgaattttgattactgccatttgcttagctcaggcttttatcacttcttgccttgattaccttagtagcctcccaacaaatttccctgacactggtcttttttccttttaatctagcttcactggattttccagcattattgaacttactatggttctcttttaaaattatttatttatttatttatttggagatggagtttcgctcttgttgctcaggctggagtgcaatggcacgatctcagctcaccgcaacctccgcctcctgggttcaagtgattctcctgccttaggctcccgagtagctgggattacaggcatgcaccaccacgctgggctaattttgtatttttagtagagatggggtttct[131 bp omitted]gacagagtctcactctgttacccaggctggagtgcagtggtgcgatcttggctcactgcagcctccacctcctaggttcaaaggattctcctgcctcatcctcccaagtagctgggattacaggtgcctgccaccttgcccagctaattttttgtattttgagtagagatggggtttcaccatgttggccaggctggtctcaaactcctggcctcaagtgatctgcccgcctcagcctctgaaagtgctaggactacaggcatgagccactgtgccctgctattttttaaaatagagatggcggtctctattttgcccagggtggtctcaaattcctaggctcaagtgatccacccaccttggcctcccaaagtgctaggattgtaggtatgagctaccttgcctggcccttaccctgattctctaaagatacgttatttcctgtctttctgcctttgtagatgctgtttcttctccaaagagcatccgcttccctgactaactagaataaaccttcctttggaggcggatagggtggttggatttttattttatcttccacccaaaaaagtatcttgttcaggcattacctatagataagagccgtctaagggttttgcaccaaatatttctctaaactcttgcctctaatgaaagaaaagaaaaagttaacaattattgctgtttatttttatttttattttattttattttttgagacagagtttcactcttgttgcccaggctggagtgcaatggcacggtgttggctcaccacaacctctgcctcccgggttaaagtgattctcctgtctcagcctcccaagtagctgggattacaggcatatgccactatgtctggctaattttgtatttttaatagagacagggtttctccatgttggtcaggctggtcttggactcccgacctcaggtgttccacctgcctcagcttcccaaatggctgggattacaggtgtgagccaatgcgcctggcctattgctgtttattaaaaacataatttagaatccagaaattctttaaacaatagactgaaaaaaatagttcacagcttggtatatggcttataacaatggcaaaaattaaaaaaaaatgcattatttttcacttactaagatgcctggagatatttttttccatttagtacttgactaatcttgcaatctgtttaaatttttcaatttcattactaattatttaaatagctgaaggtacctattttctatataattttaattcctaatgcagccatcatctactcaacaaatgtctcctttggaaagaaatcctgttttttttggttctttaagtaaaaagagagactgggctcagtggctcccgcctataattccagcactttgggaggtcaaggtgggtggatggcttgagctcccaagtttgagaccaacctgggcaacatgacaaaaccctgtctctaccaaaaaaatacaaaaattagctgggcatggcggtgtgtacctgtagtcccagctactcgggaggctgaggtgggaggatgatctgaacctgggaggctgccctgagcccgggaggcggaggttgcagtgaatcaagatcgcaccactgcactccagcctgagtgatagagccagaccttgtctcaaaaagtatatataaaaatgaaaagagaaatatttttgtttagtttgcaatctgtattaatgtcatatattaagtatctgatcttttagaagccagtaaaacacatatgggtcatataagcagtggattggccaggtgtggtggctcatgcctgtaatcccagcacttcgggaggctgaggcaggcagatcacttgaggtcaggagttcgagaccagcctgaccaacatggcaaaaccccgtctctactaaaaatacaaaaattagatgggcatggtggtgcacacttgtagtcccagctattcaggaggttgaggcaggagaattgcttgagcccaggaggtggaggttatagtgaactgagattgtgccactgcattccagcctgggtgacagagcaaaactctatctaaaaaaaacaacaacaacaagaaaaaaccagtggattataaattgacataaaacattatcacttgtattctaaaagagtcatggattataaccctcaccattgtatccatatactgtaacatagttttggaatcatcattgcaaaatcgttattcctttgcataatgagtttaaaaatggctcaaagtaaagcttgtctttcagaagcagaattccattttatatattaaaatacccagtttatgtttaagtataatattaaggtaaaactatccttgactatcaaggaaaagaggtgatattagctttagtgcaggtctgtaaaaaatacattgaagattaaaatataattgagctgggcatgctggcatactcctttagttccagctactccagaggaggagcaagaggatcacttgaacccaggagatcaaggctgtagtacactatgattgcaccctgtgaagagccactgcactccagcccgggcaacatagtgagaccccatttttaaattaaacaagtaaaatatattgattatcaaatataaaataaaagcgttctctcagattgagaccttacaaatgaatagcaaaaattagtgcctcaatgttgttcaaaccagctaattaaacatcacaatggaaaaatctgttaagtattacattaagtaattaggatatttttatgttcttatataggttgaaattatcaaaccatgaaactgaattttttctcccttccccaaagactataaaagattttaattaattaagctttctgtattgagaattcccttggttttaagaagctttctattttactgtaacttttcttttttttttttttttaggcggagtctcactttgtcgccaggctggagtgcagtggcacaatctcggcacgctgcagcctccgcctcctgggttcaagtgattcttctgcctcagccttccaagtagctgggactacaggcgcatgccaccacgcccaactaatttttgtatttttagtagagatggggtttcacc[138 bp omitted]agtcttatgtgtggcttggtaatttttgtggttaatatataatatgaaaaaattataggttccatgcatatatgatcagccatgtcaaagcaagtattgagttgtttggcatttcatagtatgtata[203 bp omitted]gaggcaggagaatcgcttgaacctgggaggtggagttgcagtgagcccagttcgcgccactgcactccagcctggcaacagagtgagactccatctcaaaaaaaaaagaaaaagaagaagataaaaaagaaagaaaaggaaaatatatgattaaagacagtattctttaaaaaaaaaatgacatcaatgagtttattttcttattcatttgttttccacctcattacagaatggatttcaagtggcaaattaattttttataatggaagtaatatttattcatcaaaaattaagtacttaccatatgccaaacactgtgctaaatgctacttattcagagataaacgtgttcctttcctcaagaagtgtgcagtttagaggaaaagtcaggcaagttaaccagcaagtacaatacaatgtgaacatgttattataactctactatgtgtgaagtgatatactgagcaccttacatactgttattctctatttttcagataaggaaattaattcttagagacattaggtaacttgtccaaggtcacacagtaagtgttagaatcagaatttgaactcaggtgtgtctgactccaaagcttgttatcttgctgcctctgtacagtatactgattagagttaagatatagatgcaggctgggcgcggtggctcacgcctgtaatctcagcactttgggagg[134 bp omitted]gaggcaggagaattgcttgaacttgggaggcagaggttgcagtgagccaagatcgtgctactgcactccagcctggtgacagagcaagactccatctaaaaaaaaaaaaaagatatagcaatgcagaggattttatggggacactgagacacatttgccaaagtagtcccttggattttggaaggggacacttaaattaggtttagaagactcaataagaattagccaagaggaagagggagctgaaaagcattccaccagagacattaccatgtgcaaaggcatggagatgagaaagcatagcacatttggtacttgtctggctaacttttatttctcttaataaaggagggtaaacctgcaaggaaaaccagagaatgacctgaaagtcattcattcatatattcagttactactgggcactgtagactctgtatttgctgtatttctagggagatactggaatttttaaactaaaagtcacagacatgtcacatatgttaaacaacataccaaataatcaggaaatagaagagtcttaaaatcttccgccctgtagtttgttttatttggctattagaacagtgtcttctaaattgtaaaatatctttctctctctttttttttttttcctctgatcgtttctctcatcattctacctgatgccaagctgtgtggggattttagaacttgaagactgcctaaactgttcccatttcaactatgcttaaatcctatttacttcctaaagatttgtaaaaggataagtatgtttctctttatcagtattcactgtgtgactttatcttttagaggataaatgtactaaaagtactaaaacagatcctttcaaggacatgtctggagagatagaagcatactgagttgctgagtagtatacaagacaacacaagaccatgacctataaatcaacatgtaaaacttaggaggtagagaataacttttccgtgtttgaaggggtttgaaggggtgatcttcatggatacatttatcattcagtgagataattttttattagtttaatttttccatccttacagtctaaagagacaggcttcaacactcgtttcaaatgctgtatcttactagaagaatttccctgaggtcaggtggaagtatcattccctcccatgaactaccccagtattgtaccaaaagacatttggtaattccttcctttgtattataagtcatttatatgcatttcttatctcttttattaaattgtaccttccttgaagcagaattcatgtttgatccacagcactaagccttgtacatatgaggcactgagttaatatttaatgaattaaaacatagcacatatattataaactaaattattaggcagtgtttcttaagtgttgaacgtgaattacctacatcaaaattatctcgagtgttttgttaaaatgcaaattcctgtgctcctgcccgcgcctactgaatgagaatttctatgggttccgggaatctgttttgaataaaaattgtaggtaattggctgggtgcggtggctcatgcctctaatcccagcactttgggaggctgagacaggcggatcagttgaggtcaggagttccagaccagtctggccaacatggtgaaaccctgtctctactaaaaatacaaaaattagctgggtgtggtgacacacgcctgtaatcccagctactcaggaggctgaggcaggagaatcacttgaaccagggaggcagatgttgtagtgagctgagatcgcgccattgcactccagcctgggtgacaagagggaaactctgtcccccccccccaaaaaaaacattataggtaattatggtgcatactaaagtctgagaaccactgcattagggagaatgtaagaatccaaattaaagttacatttatttgaaaggacagatgtatatcttggtaaaaattataaacattagtacatggtggagtataaaatataagaaagtgaataaatagatattttcagtgcaaatttttctttatcacaggaccagtgttcaatattttggaaagttcaatctaaaaaagcatatttaggtataaataattttaaatattggccattttctgtgaatgcatgtgaaataaagcaccatggttttataattaaagactaagaaaagacatattggacatcatatctgcacatccttatattgctagatgcaaagattgccttttagggcatgcttctttataaaatagtttgtaactaatagtactgtcagaaatactgtagtttagataatatttaacatattttgctccttatttttctgtaacaacacattatattgttatgtttatttgtagattttcttatttgtgtatgttttatctgtgattttttaaaaatgtgaaattgttgttagaataccatttatcttggcttatgcattattgaattgataaggactaagataagctatagcaagcaagtaatataaatcttcatctgggtagttcttttttttttttggagactgagtcttcctctgtctccaggctggagtgcagtggcgtgatctcggctcactgcaacctctgcctcctgggttcaagcgattctcctgcctcagcctcctgagtagctgggactacaggcacacgccaccaggcccagctaatttttgtagttttagtagagatgaggtttcaccttgttggccgggatgcttgtgatctcttgatcacgtgatccagctgcctcggcctcccaaagtgctggaattacaggtgtgataaaatagttttataaacctaagctgtatttataatggtaatacaaataagaaatgtttaaaataatgcttgtaatgtagaacactggtccaagtattttacatacattaattcatttaatcctcatgacaactaaataagatagacactgttattatccttatattccaagtaaggaaactgaggtataggttaagcgatctaagtttacacaactgataagtagctaggatatgagccagtataatctagcttcagagtcagcattctcaaccgctctataataatgttattattgtatttttaattagcaatttgtttgattttgtcataatcattatcagatcttccagcagttacatggcagatattttcaagtaaatattttaaacaaattcagcctatatctaaacaatatcttttaaaaattatttttaatgctattcttacttttactga[221 bp omitted]gaggcaggagaatggcgtgaacccgggaagcagagcttgcagtgagccgagattgcgccactgcagtccgcagtccggcctgggcgacagagcgagactccgtctcaaaaaaaaaaaaaaaaaaaaaaaaaaaaagaatagttggatttcagaggattgttttaacctcccatttttggtgtttgtgatggtggtagatggtcatttaacttaaaaataaataaataaataaaaaataaaggccagacatggtggctcacgcactttgggaggccaaggctgtgaggattgcttgagcccaggagtttgagaccagcctgggcaacatagtgaaaccctgtctctacaaaaaccttttaaaaattagccagacatgctggtgcgcctctgtagtcccagctacttaggaggctgagataggaggatcccttgagcccaggagtttgtggttgcagtgagccatgatcgcaccactgcactccagcctggatgacagaggagaccctgtctccaaaaaaaagcagggagagccttgattgacccaaatgaaaatctagtaattttaattttcagaagctgttagaacacataatggattcttacgacaaaatctagataaatttgcataccaattttgaaaaattatatataaaatatgtttagtaatgtacatttctttctgctaaaaagcactagtttttctctacaaaaatgcatttttaaattaatgtctctctggtacacaggaataaaatatttgtccttgatctgtgtcatttcctcattttaaattcaccaaatagtttattttaggtgtcatttattgctttattttaataaatactgaaaatgattaaccacattgtagaaatacccaacttatgaactcatgaatattgggctatgttttaatatgtaaattatgtttaaaaattaatctgtttcttcaaaacattaacttgcctaagtggtttaattgaataccatcagactctgttataatcaggacagctcagaagaagagaactaaattagagagaaacccagaatggaaaataagggagagtttaatgcttagaataaagagttagaaaagaggaggtgggctataggaatctttaataagaagattatagggctgggtgcagtggctcatgactgtaatcccaacactttggaggatgaagcaggaagattgcttgaaccctggagtttgagaccagcctgggcaacatagcaagtccccggctttacaaaaaaaattaaccaggcatggtagtgcctgcctgtactcctagctacatggcaggctgaggaaggaggatcccttaagctctgaacttggaggctgcagtgaaccattcaaccaccattgaaccccagcttgggtgacagagtgagaccttgtccccccacctcaaaaaaatcatagatatgcccaaacattttgctcttaatagcataattaagatatttttattttcaatgcaaatttgtaatcttaaattgaaaaactttatgaacattgaattatccgtggaactcaaaggaaaaaggatcactgtaattttatattttacaggagaaaagatttcttgaacttttttgctttgatctatattttgtcatttcattgagagtagaaaaagaatgcatcactttttataaacaaaatatttttcttttctaaatatgacaccagtatgaaacttacccaaggtgtttaagtgtttaaaatgtaaactgaagatttgattgttattaaagtatcattttacctgttggctgagaggattcagcatagtgcgagggagtgggaacaagtacctataagtatacatagggcaattaataactgttgaaagaatgataatatcctgtttctcaaataaacagaattttaccttactacacaaagaatttaattcaatttagtctatggagtttcctactagaatataagctccagactttcttttgctcaccatcctatcctcagtacctaggatactgaatgcttaggacatagaaggttttcagaaagtacttaatgaataaaatatatgcttaacacattttttattgtggcaaaatatacatcacttattggtttgatattgttgttgttgttttgaaccaagattttgctccatcgcccaggctggagtacggtggcatgatcatggctcactgcagcctcggcctctgggtctcaatcggtcttcccatctcagcctcctgagtagctagctgggactacaggtgtgtgccagtacacacagctattttttttttatttttctgagatggagtcttgctctgttgcccaggctggagtgcagtggcctgatctcggctccctgcaaactccgcctggcaggttcaaacaattatcctgcctcag[132 bp omitted]tggcctcccaaagtgttgggattacagacatcagccactgtggctggccatctttttttttttttttttttttttgagacggagtcttgctttgtttcccagcctggagagtgcagtgtcatgatcttggctcactgcaacttctgcctgtcgggttcaagcagttctcgtgcctcagcctcccaaatagctgggactacaggcatgtgccaccatgcctcactaatttttatattctttgtagagatggggtttcaccacgttgcccaggctggtctcaaactcctgggctcaagcaatctgcccgcctcagcttcccagagctgaaattacaactctgattctcaggctgagattacaggcctgagccacagctcctggccctaatttatgttttacatagcgttttgttctgattagatacaagccatatgctcattataggaatttttgaaactatggggaaaaagaacaaaacttacttgtattttgccactccaaagagccatcctttaggaatagttttctctatttctttttttctattcaaatataactaaattgagatgatacatacatatatatatatatatatatatatatatatatatgtagtattgtgccctgcttttttccttcaacactttcaagtgagcactttttaaaatcattaaacgttccttgaaaacataatgttgaaatgttagtgtgattttgctcaaaattcacagtaggagatatattttattttgtgattaaggccacatgtacatatttaattgtatcaaaaaattgtaaaacagtattaagggtaatgaattctgatttttttttttttttttgagtcggagttttgctcttgttgcccaagctggagtgcaatggtgcgatcttggctcactgcaacctccgcttcctgggttcaagcaattctcctgctcctcccgagtagctgggattataggcatgcaccaccacacccagctagttttttgtatttttagtagaaacggggtttcaccatgtttgccagtctggtctcgaacttccgacctcaggtgatctgcccgcctcagcctcccaaagtgctgggattatagacgtgagccaccatgcccagcctgcattctgatattatctgttgtattttattctttaaaatatgcttgttccatccctttgaagtgattttgtatttcactaatggattgcagcctgaagttggaaaaatgtctcttgtatgaatattctgtaattcaattatgacccttttattggacaaatttggttcagatttttgccagtagatgtatttaaaagtgtatgtgactgtatttacaaaagtaattaaggctgactgtaataaattattcccaaagtgctaaaatgtaagtcttccttatcagtttgttgtatattttttcagatttttgtatgcattcattcactctctatgtcaatatctatctttacacacttttttttcctaaacataatgtgattattctactacaactttaaattttttaaaagtgtatcatggctgtcttttcagatcaacatgtaaagatttacctcattcttttgtctgctgcatagtgctccgttacaggtggatcataatttaactttcccattattaatgaagattgtgatgcttccaattttttgtgttacaaagaatgctgcagtggccattcatatatgtagatctttttgcatacctgcgtatattttagtagaatagattttcctggaattgaggttgttgaaatatagggtatgcatgcttaaaatcttttcttaaattcttcaacttatccttcagaacatttata[133 bp omitted]aacatggtgaaaccctgtctccacaaaaattagccaggcatggtggcacacacctgtggtcctagctactcaggaggctgaggtgggaggatcacctgaggctggggaggtcgagcagtagatactttcaattttaatttttgccaatctgatgagcaagaaagatacatttgatttgaatgtattggcttggcatcttttcacatgcttattggtgttttatatttcttctgtgatttgcttgtttatatctttaatgaacttttgtatttttattatagatttgtgggaaatctttatgtattatggatattagccacttgagtatcatgtgttacaaatggcttctcccagtctataagatgtcttaaaactttacaagagaatctttttctatatagaagttaaaatttttgtacttggtcacattggctaatttttttctttatggcttctgggatttgtattatgtttaaagggtctaactgaccttgcctacctactgtcttctatgttcctctagatatttatagctttttatgttcattgggaatttttgtattggataccaccacgtataaatagttcaaattgatatatctaattattacttctgataagtaaataattcttttaattagaaagattgaaaagtttgtgaaaggagttttaattttgtcaaaatgcttaaattgaaacctggaagtctataatggtaaatatagttggctaaggcatgaatataagatttataaaagattggtataatggtagatactttttggataggaaaatatttaaataaaagtgcagatgtctttttttttttttttttttgaaacggagtctttctctgttgcccaggctggagtgcagtgtcacgatctcagctcactgcaacctccacctcctgggttcaagtgattctcctgccccagcctcctgagtagctgggattacaggcatctgccaccacaccaggctaatttttgtatttctagtagagacggggttttgccacattggccaagctggtctccaactcctgacctcagatgatccacccgcctcagcctcccaaagttctaggattatagttgtcagccaccgtgcctggcccaaaagtgcagatttctaagcagtcttcatggccaaccaaattcatttgaatttaactatgggtgtttcacaaattcttgccttgctgacattttcgtcttagattgtaagggaaaaaatatatttgtatgagaagtcttgagggatatacaccaaattattaacaatgatttttttggggccaggcacggtggctgatgcctataatcccagcactttcggaggctgaggcaggcggatcacctgaggtcagagttccataccagcgaaaccccgtccctactgaaaatacaacattagctgggcatggtggtgcatacctgtaatcccaggtactcgggaggctgaggcaggagaatcacttgaacacagtaggtagaggttgcagtgagccaagatcacgcctgtgcactccagcctgggcaacagagcaagactccgtctcaaaagaaaaaaaaaataaaataaaatgcagtgattttttcttgggatggtaagatttcagatttttgtaaacttttttacttattatgttttaagttttttttccaacaaaaaatgttatttgtttagtaaatatagaacagataaaggattaaatgaagggtactgttgctctgcatctatttatagccaatgaggaagaattgcttggtgggtaggaatgatagaaacctctggagacaaagtgaccagattattaaagtttgtgatagctaggatggagaattctagaaggagccacatacacatattgtctacatggtaggaagaaggctttaaaaaaattgaacaaaaaataagtaatcatgaccttatgagctaagacttggaaaattgggaaacattaaaacataattatataattatacagttataaattataacaatgagtgttttttaaaaggcaagtgcaactaaaactactgtgacttcacttgcaacaatcttaactcaggtttttgttttttttttttttgagatggagtcttggtgtgtcacccaggatggagtgcagtggtgtgatcttggctcactgcaaagtctgcctcccaggttcaagtgattttcctgcctcagcctcccaagtagctgggattacaggtgcgtgccaccacgcctggctaattttttttttttttgtattttttaatagagacggggtttca[132 bp omitted]aaagatgaatatagaaaagtgacaaacataagtgtggcagaataattaaaattaagaattaacagatgtgaggaatatattaaagataattttaaagattttagaattatattcagaaacaggaatatggaaaatgtatgcttttttaatactaacagctcctattttgtttccatattttccatcaaggagaataatatttattctgtaagaacaacaacaaatcacttagtaaagtagaattaaagtccaatataggtgaaattaagaaagtatcttaactactcaatatgactttgttttctaacctgaactaattatatctgagattgctatgaacttgtaggtaagaaagttcaactttgaggaattattgagaatagaaaaatgccagaggattggaggtaagcaatgagtaaggactttgacagcatgatgatcacattcagaaatgacaaagcttgatggaccttcatgcaaacagtaaaaataatttgaaagtctgtagcaacaaggagttaacagattggtttaaataagtataactaaatatataatcctgaatttgggttggaaaaaaccatttgaaagaagaattgatgaaggataaatagcctaataggagcatttatgacaaagggaattttattgttgataaacttaattgtgaatcagccataagatttgcctgccaaaatttaattactgtagttttttgaataaaggaggttggttaggcctggacttggcatgtatccagatttaggtactacctttgagaaaattggcgtatgtccaaatgacagcagtatcagccctttctcatgtggcaaaagaattagacttaatctagccataaaagcagctctgggacataagcccaaaagaaggaagaattttctagtgattagagctgtctagagaataaacaggatgcttcgagaggcagtagtatatttgtgtagtggttttgtttgtttttttgagatggagtcccactctgttacccaggctggagtgcaatggcgtgatctcggcccactgcaacctcctacccccaggttcaagcgattctcttgcatcagcctcccgagtagctgggattacaggtgaccaccaccacgcccagctacttttttctgtatttttagtagagacagggtttcgacatgctggccaggctggtctcaaactcctgtcctcaggtgatccacctgcctcagcctcccaaagtgttgggattacaggtgtgagccaccgtgcccggcctgttttttttgttttgttttgttttgttttgagacagagtctcactctgttgcccaggctgaagtgcagtggctcagtctcggctcactgcaacctccacctccctggttgaagcaattctcccaccttagcctcccgagtagctgggattacaggtacgcaccaccacacccagctaattttttgtatttgtagtagagacgggtttcaccatgttggccaggctggtctcgaactcctgacctcaagtgttctgcctaccgaggcctctcaaagtgctgggattacaggcatgagccaccacgtccggtccttgtatagtgtctgaatgaagctagtttactgctttagtaagaatgttatagagtgaatcaaagttcagatgtcttgaatattggtttgattttacattttttcatatggttactggccatttgtatatcttctttggagaaatattcattcaaatcctttaccctcctcccccccaccactttttttttttttttgagacggagtctttatttttttttgagacggagtctcactctgtcgccaggctggagtgcagtggcaccatcttggctcactgcagtctccgcctcccgggttcaagcaatgctcctgcctcagcctcctgagtagctgggattacaggcccgtgccaccacacccagctaatttttgtatttttagtagagacgtagtttccccatgttggccaggatggtctctatctcctgacctcgtgatccgcctgcctcagcctcccaaagtgctgggattacaggcatgagccaccatgcctagccttacccattttttaaattgggttatttatcttttattatttgaattgtaagagttctctatatattctggacagaagtcccttatcatatatgcttagcaagtattttctcccattctgtgagttcttcactttcttgatggtatcatttgcaaccaaagattttcaattttgatatagtccaatttatatattttttcttttgtcacatgtcctttggtgttgcccaatccaaggtcatgaagatttactatgtgttctcttaagagttgtatagttttagcttttcatttaggtctaagatttattttgagataatttgtgtatatagaggagttggagttcaatttgattcttttgcaagtggacatctagttatcctagcaccatatgttggaaaaacttgttctttccctcactgaattgtcctggcactcgaatttttagaagaataatataacttttatttatttatttatttatttatttatttatttattttgagacagagtctcactctgttgcccaggcaagagtgcagtggtataatcatagttcactgcaatcttgaactcccaggttcaattcttctgcctcagcctcccagagtagctagatgtaccacacctggctaatttatatatatatatatatatatatatatatatagtagaaccaggatctctttatgttgcccatgctggtcttgaactcctggcctctagtgattttcctgcctcagcctcccaaagtgccgggattacaggcatgagccaccttgcccagccataacttttattttttataaaaaatataataaaaactatggaagataggagagaaagtacagtaaccacgacccccccagtcttagggggatgcgttccaagacccccagtggatgactgaactacagatagtaccagacccagttgctgattgtattaattgaaacacgtttcagttcatgttttccacccacaaatttactgccttttccatcttaactgagcacttatcacacactgtggctataacttttgcagtttgaggtgtgacaggaaaactaacatgaatctctttttccttcacaatttcatggggttgggggaagattcattcttaccataaatctcagcaacctcagcatatgatttttttctttcttgaaatcaagaactttcaccttttcactttttttttttttttttgagacagagtctcactctgtcgcccaggctggagtacagtggcgcaatcccggctcacttcaagctccgcctcccgggttcacgccattctcctgcctc[211 bp omitted]ggcttctctttagcatatctgaattgccagcatcactacttttgcaatttgggaccattattaagtaaaataagagttccttgaatacaaacattgctataatgttacctgacagttgatctgatagccagcctggctgctaaattactaacagctggtagcatgcacagcatagatacactggacaaagggatgattcatgtcccaggcaggacggagtgggatgatgcaagatttcatcgggctgctacagaatggcgtgcagtttaaaacttatgaattgtttatttgtagaattttccattaaatatttttggattgcagttgaccatgggtaactaaaacttcaaaaagtaaaaccatgaataaagagagactactgtaatgcataattctgccaccgttacacaacttccatattattgtttttgttgttgcctaatgttcatctgcagtttatacataatttaataattagtcccttattttgaatatttaagtttaatatttattatttaaataacattgcaatcataatctttgtgcataagctattagctttctattgcttaattttctttgacacatttctgaaaggatttcttctaaacatatattgaaaaccactaggggttagttacataattttgattttgaaaattctgaagtagagggtgttaaataaattggcccatttaacattacaatagcagctgatgcggacctctggctgtgggtcaggcaatgtgccaaatagttgtgtgcataatcatatttagttcttactcaaattctattagataaggaattcaaggctcagaaaagtttgataacttgcccaaagtcatataactagtaaatggcaaagatggcatacagggctgtgtgactctcaaacctcagtggctcccatactggacataaacagttatgatggcaagattcccacagtaatacattagattaaatattttgtacagaaattctctgaatacacatgacttaagtactaatgcattattggcccaaatttttcttttttttcttttcttcttttttttttaacccacagctaatatgatagcttaatatttgtttggtaaaaatggaaatctaaaaatggatttttctctggagatttaataattcgttattcttggacccatggactaatcattttgtattatttccatgtgtgtagcacttaccattccaaagagtctagagagtatacataaccatacagaagttgttt[135 bp omitted]ccatctctactaaaaatacaaaaaattagccaggcgtggtggcaggcgcctgtagtcccagctactcgggaggctgaggcaggagaatggtgtgaacctgggaggtggagcttgcagtgagccgagatcgcaccactgcactccagcctgggcaacagagtaagactctgtctaaaaaaaaaaaaaaaagaaaagaaagaaaaaaatggttttggccgtgttcagagttttctttaaaacatgaaaatgccagttctgtacaaattcttgttccaaatttctatttttgcagtctttcagcacatcaaactgtataaactttttttcttcttccctgagatggagtcttactctgtcgcccaagctggagtgcagtagcccgatctcagctcactgcaacctctgtctcctaggttcaagcgattctcttgcctcagcctcccaagtagctgggattacaggcgctcggcaccacacccagctaatttttgaacttttagtagagacgaggtttcaccgtgttggcaaggctgatctcgtactcttgacctcaagtgatccacctgcctcggcctcccaaagtgctgggtctgtataaactctttctttccttgattttcatccaaagagttagagtgtatacagattaacaaggtgactggaggtatttgtatgcccttgacagaagagtcacttcagtctgctacaacggtactctttcactacgggtatagtttcacatactattgtgagggaagaaggtacatttacttagcagaagccatccattttatgaaatgccaattccctgaatttacttcttttaaactagttttagttgatcagttttcatcttcttggtaacatttaaaagaatgttcaatttgtttctgctccaattatctgctgctgtttaggaggaggtggacagaaaagaatttctcatattcaaggatataatagcaatgaacgtattttttgtcagtgcagaatttaaagactaagactttaagtctgatcctcttcctttttctgccgcctcagtctctggcaacaatagcagggagttagggcagacaaattgaacattccttttcatgctttatacagattgaaactgatcaactaaagagttaaagaagtgaattcagtgacttgacctttacttgaaatgatttttaataattttagtcagtgatccagaactcacctaagcagccagattagctgagttaatcctaataatgaattgacagatgcttcagttacactgccttcagatcctcaaaattgagaatattcataatggcatatcacaaaatggactatcaagcctaatacataaaatgtacatctgttttggactgaaagattgactaataaaagcaattaagtgatcttttctctagaagtttgtttatactgacttctacacctccagctctacactgttaccagagctcaagcccgtaattctaagaacataagaaacattttacttttcatttcagtatatccaataaagattctgccttgttccacatcaaatagcacctctttaggtttcttcaggctcatacctcattcttttccatcccacccctatttagttattcatctatttctgtcactttttcctttgaaacatgtctcagatttagtcttcattcttgctgcggccaccccagttcagtcttcattactcattgccttctaactttatttttctgattacattcttctttctagtagtaggttaaatttacactgctttcatcatgtgtctccgtgaggtaatcccaggagctctgcaaaattcactagctaatctctgacttaacataggatgtagtatcagaagaatcagctatgatccactagtgcttttcttgctcacttgacagctgcctgctatttgaacaaaaggcatctttattttcattctttcttagatgactctccgatgtgatcctttgcacatatatatggatcacatctgagagtcatttatatatatatatatatatataaaatgcaaatacctgcctattattaccttttgatgtgacacacaagaacactgttgcctgtgtcagacattcagcaagcattatagtttagtcccataatctcattttatcaagaagcctaattttgtaggctttggttgtctcattctgccaccagaaagtaaatttcttgaaggcaggcactatagaattttcattctagcacaatttttgacagtttttatgcatttttgaaatttttattgaataaataagttagttgagcaaatatttattgcatttattgagggcttactctgttccagcaactgtgatgatgtaagcagcactgaaaaggagcagatatggttccttagcgtgatcatagttcattacagcttcaaactcctgggctcaagggatccttctgcctcagcctcctgagtagctaggactacaggtgtatgccaccatgcctagctaattaaaatttttttttttttggatagccagggtcttaccatgttgcccaggctgatctggaacttctggcctcaagcaatccacccactgtggcctttcaaaactggtgacatgagccactgtgcccagcgcggctcttgtcttgagtttatgatctagtgagaaaggcaggtattaaacaaatacatggccagttatgatggtctataatggacatcatcagttccttctctttgtgtatatgcatgctatttttcatgtctagaaatagagtctaattcccctctccttgaatctgggctggtcaatagaatgtggcagaaataaacattttggaactttgaggctagaccttaaggctgtaaagcttgtgtctgggtctctggaaatatttttcttgagataatccctcttaaaacccagtcactctgttgcaagaagctcaagccacatggagaggccttgtgtaggtaacgctgatcaatagccccagctgaacttcaatggccagaatcaactggtcctgtgagtgacccattgtgaacatccagtccagtccagcctttagatgacttcatgccccctactgtcttactgcattcatgtgtgagaagatcgagaactacagatctgagctttgtcaatccacaaaatcttgagagataataaatttttttttttttgagatggagtctcactctgttgcccaggctggagtacagtggcaccaccacagctcactgcaacctccacctcctgggctcaagtgattctcctgcctcagcctccggagtaactgggactacaggtgcccgccaccctgcccggctaatttttttgtatttttagtagagatggggtttcaccatgttggccaggctggtcttgaactcctgacctcaagtgatccacccacctcagcctcccaaagtgcagggattacaggtgtgagccaccgtgcctggcctgagaatgaattgttttaagccactaaatttgagtggtttattatgcagcagtataatacattttggttatctaaccagaatgtaaattatcagattatcagattatgataaatgctataatggacatgaacaggaataaaaggaaaacctaatttagatgattcggagatggcaacatacaattgtttaataatgttttgtctttctgctcaactctgcatttggtgagagcagatactgtcctatttttaactgtgtccccagcacgtggcatatatgctcaatatcttctgaagtaataacgaagaccttttattagtgtctcagagaagtccgtaactccaaaaaggttaagaattactttattaacagcaaaactttcctctttatccacttgtataggaataccacatcctacccaagcacaaaattccaggttttctggactgaatacctacacccaggatcgatgtgaatagggcagtattttcctgccagaggttataggtgatgcctttgagttttggggatttaatcataatgggctacatcacatgtatggaggttacgcaggtaatgagagggactggggccaaggagcacacagatgagtctacttaatggaagaaaactaagcctcagatgaagtctgttattctataaatagcctctgtattccttaaccctttttcctgttattccttccatgaactttctgcttaatttctttcattttaatgtgtttcagggactgattctcctctaaggttgcacctaacacttttcttccttgcccatttcttccctatacaccattcttattcccatctttgtgtctttcttattatgtgtttctcccattttctagggtatttttccttctttctgcttatgtaaatttaatcttttgggagtattttaagtttacttcactggaactttccttgaagattccaagttaaatatgcctctccttcctgagcttctattttacttatttgttcccaggacatgacttttgtcatatccttttgtatcttgccttatacaataataattattatagtaataataattattactatatgatattatatagtaatattatatagtataatatattgtaactaattattattaccacaataatgattactattatttttgagacagagtctgactctgccaccaaggctggagtgcaatggtgtgatcttggctcactgcaatcaatgcctcctggggtcaagccatcctcccacctcagcctcctgagtagctgggactacaggtgtgcaccaccatgccctgctaatttttgtatggttttgtagagacagggtttcaccatgttgcccaggctggtcttgaacttctgagctcaagtgatctgaccgccttgggctcctaaagtgctgaatgctgggactacaagcgtgagccactgtgcctggctcatatcataattatataatttttcaactctttcctatgtaacatggctataaatacttggaacagttattattttattttataagaattttactctttttttttttttttttttttttttttttgagatggagtctcattctgtcaccaggctggagtgcagtggcatgatctcagctcactgcaacctccgcctcctgggttcaagcgattctcctgcctaagcatcctgagtagctgggattataggcacccgccaccacacccagctaatttttgtatttttagtagagacagggtttcaccatgttggccagatctcaatctcttggcctcatgatccgcccgccttggcctctcaaagtgctgggattacaggcatgagccattacgcccagccgaattttactactttttaagtgggtgtttaataattatgttggcttgatagatgctctgcttttcttttttattccatttgaacttgactctctaattcctcttgaattttcctgatttgttatactcccttcttcatcttttaaccttgaatctttgttatttccttctttgctgattcccatgatctttctgtctctactacatgtatatgtaatatatgcacacaaagatatatactactacatataatacactaacatcacattttaaagtaattattaatgcctttgtaaaatatttattattattattatttttttttttgagatggagtcttgctctgtcacccaggctggagtgcagtggcgcgatctcggctcactgcaagctccgcctcccgagttcatgccattttcctgcctcagcctcctgagtagctgggactacaggcacccaccaccatgcctggctaatttttttgtatttttagtagagatggggtttcactgtgttagccaggatggtctcgatctcctgacctggtgatccgcctgcctaggactcccaaagtgctgggattacaagcatgagccactgtgcctggccaaaatatttgttattatgtttatatagtgataaagttaatctacatctgagatctggaatataaattttacattaaatacaatattacttgtttatatctgtacaattctgtatttacaaggtctcaacatctattttatccacatcgataagtagaatttaatacttctatataaactgtgtatataccacttttattttattttgcgacagggtttcactctgttgcccaagctgaagtgcagcagcgcaatcttggctcactgcaacctctgtctcctgggttcaaacgattttcgcatctcagcctcctgagtagctgggactacaggcatgcaccactgtggcctgatctcagctcactacaacctccgcgtcctgggttcaagcaattctccctgcctcagcctcctgagtaactgggattacagatgcctgccaccacacctggctaatttttgtattttttagtagagacagggttttgccaagttggccaggctgggtataaactcctgacttcaggtgatccgcccacctcagcctcccaaagtgctgggattacaggcaggagccaccatgcctggccaatttttaatttttttttagagacaaggtctccctgtgttgcccaggctggtctcaaactcctgggcttgaaatcctcctgcctcggcctcccaaagtgctgcgattacaggtgtgggccaccatgcctggcccaatttattattatttattttttgaagtattttatgttatttttaacttttagcttcaggggtacatgtgcaagtttgttatatagataaattgcgtgttgtggggtttggtgtacagattatttcatcactcaggtaataagcatagtacccaataggtagtttttcaatcttcactcttctcccactcttcatcttccggtaggccccagtgtctgttgtttccttctttgtgtccatgtgtacttgatgtttaactcccacttataagtgagaacatgcaatgtttggttttctgttcctgtgtaagttcgcttaggataatggccttgagctccatccatgttgctgcaaaggacatgatctcattcttttttatggctgcatagtattccatagtgtatatacaccacattttctttatccagtctaccattgataggcatttatgttgatcccatgtctttgacattgtgaatagtgttgtgatgaacatatatgtacatgtgtcttttttttttttttttttgaggcagagtcttgctctgtcacccagactagagtgcagtggcatgatcttggctcactgcaacttccgcctcccgagttcaagcaatccttgtgcctcagcctcccaagtagctggggttacaggagcccacccccatgcccagctaattttctttgtatctacagtagagacagggtttcaccgtgttggtcaggctggtcttgaactcctgacctcaagtgatctgcctgccttggcctcccaaagtgctgagattacaggcatgatccaccacgcccaacctacatgtgtctttatggtagaatgttttatattttggggggtatatactcaataatgggattgctgggtcaaatggtaattctgttttaagttctttcagaaatcaccaaactgcttttcacaatgggtgaattcacttagattcctgctagcagtgtgtaagtgttccctttttgccacaaccttgccagcatctgttatattttgactttttaataatagccattctggctgggtgtgggggctcatgtctgtaatctcagcactttgggaagctgaggcaggaggatctcttgagcctaggagtttgagaccagcctgggcaacaaagtcagaccctgtctctacaaaaaaatcaaaaaattaactggatgtggtggcgcacgcctgtggtcccagatactcgggaggctgaggcaggaggattgcttaagcccaggaggtagaggttgcagtgaactatgtttgtgccactgcactgtagcttgggagacagagtgagacgctgtttgaaaacaaaaaacaaaaacagctattctgactggtgtgagatggtatctcattggggttttgacttgcatttctctaatgattagtgatgttgagtattttttcatatgtttgctgggtacatgtatgtctttttttgaagtgtctgttcatatcctttgcccacttttaaatgttttgttttttgcttgtgaacttgtttacgtttcttatagattttggatattagacctttgtcagatgcatagtttgcaaatattttctcccgttctgtagtttgtctgtttactctgttgacagtttcttttgctgtgaagaagctctttagtttagttagatcccttttgtcaattttttttgttgcaattgtttttggagtctgatactgtcacccaggctggagtgcagtggcacaatcatggctcactgcagccatgaactaagctagcctcttccgttagcctctggactggctaagactacagatgcatgccaccattgctggctaattctaaaattttttgtagagacagggtctcattatggttccccaggctagtctcgaattcctggcctcccatgatcctccctccttagcctcccaaagtgctaggattataggtgagagccatcctgcccggcttggttttttcccatggcactttatttatttatttagagacaggggctcactcagtagctgcgactacaggcatgtgccaccaagcctggctaattcttgtatttttgtagagagaagattttgctgtgttgcccaggctggtctcaaactcctgggctcaagtgatctacttgccttggcctcccaaaatgttaggattacaggcgtgagccactgtgcttggcctctatggcactttaatttgacattgacctttatcttttaattaagtattatttacttttgtttttattctccagcatttatataaaatttttgaggcatatggaaaaattgtaggcattgaacagtgaacacccatatacccacaactttgattctacaattaatgttttactgtatttgctttatcacatcttctatatgtttatacatcattctatccattttgtttttggttgcattttaaagtaagctgtggccagccatggtggctcacacctgtaatcctagcactttgggaggctg[134 bp omitted]ctgaagcaggagaatcactggaactcgtgaggcagaggttgcagtgagctgagatcacgccacttcactccagcctggacaggagcgaaactccatctcaaaaaataaatcaataaagtaagttgcaaagtttgcccctaaaaaacaaataatttactgtagctcaatgtttgtttatttttttcaagtttccaacaagtcattgattactttttaaaaagtaaaatttatatacaatacaatgcgtaaatcttaattgtgctatttgatgaattttgacagatgcatgtatctgctaactaatatccctatcagaattagaacattactgctattccagaaggtttcttcacaccctttcccagtcagtcttcacccatgctgcccagaggaaccattactccttttttcaccatagattaattttgcctattctagaatcccatgtaaacagaagcatatagtagagacacttttgtggaaagcttctttcagacagcatgttttttgagattcattcatgtcattgcatgtattcagttatttctttttattgctgagtagtatttgattgtgtgaatgtaccacagttttttcatttattctcctgttgatggacatctgagcggtttccatttttttggctactattaataaagctcctatgaacattctcgtgcaagtctttttgtggacatggcttgtatttctctaaggtcctaggaatagaaatgctggatcattaggtaggtagatatacatgtagtttttaagaaactacctgatattttccaaacttgttatatcattttatgtggccacgaaaaatgtatgggaatttcagttgctccatctcttcaccaatgtttggtgttatcagtcttttaatttttggctattctcttggcaagtgacacttgtgtattgaggacaaatgtaaaaataaataaataaaacttggctagtctcgtgggcatgtaatagtatcttgtacttttaatctgcatttccctgatgacttatgattttgaggatcttttcatgtgcttattagccatttatataacttcatttgtaaagtgtccagttattttgcccattttaaaattgtttgtatttttccttactgagttataggagttcctaacacattctgaatatcagtcattgttggatatgtgttttgcaaatattttcttctgtgtgaattacgttttttgtttgttttttttttttttttgagacgaagtctcgttctgttgcccaggctggagtgcagtggtacaatctcggcttgctgcaacctccacctcccgggttcaagcgattctcctgcctcagcctcctgagtggctgggattacaggcaggcgccaccacgcctaatttttttatttttaatagagacagggtttcacca[131 bp omitted]tgtcttcagtcagcagaattttaaaaatttgatgaatatctatttttttcttctattgttactgctttgctgccctactaaacttttgcctatccccaagttgcaaagatattttcctgtgttttctgttttcttttcttctttttttttcttttgagatggagtctcactctgtcacccaagctggagttcagtggcatgatcttggctcactgcaccctctgcctcctgggttcaagtgatactcatgtctcagcctcctgagtagctgagattacagatgcatgccaccatgctcggctaaattttgtatttttagtagagatggggtttcactatgttggccaggctggtgtcaaactttactgacctcaagtaatctgcccgcctcagctcccaaagtgttgggattacaggcgtgaaccactgtgcccagccctgtgttttcttatagaagttttatgtttaggtctctgatccattgcaaattaatttttgtatatagtgtgagataaagcttaaggttcatttattttcccatctagatatccagttgttctggcgctatttgttgaaaagacaatttcccattggattgctttggttcatttgttgaaaatcagttgatagtgcaagtgtgggtcttttcagtgttctctattttgttgatatgcttgtctatttatgacagaatcatgctgtcttaattagtgtaatttcacattaagtctttttttttttgagacaaggtcttgttctgtcacccaggctggagtgcagtggcgccgtcagggctcactgcaacctccacctccagagctcaagctatactctcacctcggtcccccctgagcagctgggaccacaggcgtgtgccaccacactcagttacttttttttttttgaaatggagtcttgctctgtcacccaggctggagtgcagtggcacgatcttggctcactgcaacttctgcctcctgggctcaagcgattcttctgcctcagcctcccaagtagctgggactacaggtgtgcaccgccacgcctggctacatttttgtattttttgtagagatggggtttcactgtgttggccaggctggccttgaactcctcacctcaggtgatctacccgcctcagcctcccaaagtgctgggattacaggcatgagccactgcaccttgccaaattttttgtattttggtagagatggggtttcaccatgttgttcaggctggtctccaactcctgagctcaagtgatctgctggccttggcctcccaaagtgctgggattacaggtgtgagctaccatgcctggcctcacattaagtcttgaaattaggtaatgtaaattatccaaccttgtttctccaaattgcttggattttatagatcttttgcatttccatataaattttaaaattaagttttctgtttctacaacattcctggtaggaatatgaatgggattacattgactatgtgtgtaaatcaattagcaaagaaagtaaatcttattgaatctttcaatccatgaacattataaatatgtatatatacatatagatggatgttgaactttgtcaaattttttttttctgcatctatttggatgactatatgatttttgtcctttatctgttaatgtggtcattacattaattgttttttcaaacattaaaccaacattgcatttctggaataaatctcatttagtcatgatgtgttatcctttttatatactgctagattcaatttggtactattttgttgtaaatatttacatctttgttcatgaaggatattagcctataatatttttctttccttctctcttcctttttttctttttgtaatttctccagctttggtattgggttattttggcctcaagaaatattgaatattgtctcttctgttttctgaggttgtataagatgttatttctctaagtgtttgacataattcaccagtaaaactatcttggcatgggttttctttgtggggaggtttttgataacaaagtcaatttctctgatagacaaggggctgctgagattttctctttcatcttatctaagtcttcgtaaatgatgtattttaaggaatttgtctatttcttctaatttgtcaaacatattgagataaaattgtttataatagtcttttattatcattttaaggtctgtgggatcttaggtgatatcctcttttattcctcacctgggtgatggtctctgttctttttcttgacctgtctagctagaatattataaattgtgttgactttatcagtttcactgatcttttcaaagaaccaacttttggctttattaattttttctgttttttgcctgatttctacttcattgattgcaattctttatcatttctttccttttatttactctgggtttactctgctcttcttgatttttaatttaattctgctggggtcagagaacataccctatattattttgattcttttatttttattaaaatttattttatttcacaatatattctatcttggtgaacatgccatgtacacttggaaagaaagtgtattctggccttgctggatgtagtgttctataaatgttgattaggtcatgttggttgttagtgtttttcaaatcgtatacgttttcattgatattgttaagtgagaggagagtgttgaaatctccaattgtgattgtaatttagtccactttttcctttgattctgtcaatatgcttcacatagtttgaaacttgtttgacaaacatacatatttatgactgttgtttgtttgttccttatgaattaaccattttatttttagataaatgtccccctttatctctgataatattgtctttttccccttcagtctttttttttttttttttttgaggtggagtctctttctattgcctagactggaatgcagtggcacgatctcggctcactgcaacttccgcctccctggttcaagtgattctcttgcctcagcctcccaagtacctgggactacaggcacgtgccaccaggcctggataattttttctatttttagtagagacggggtttcaccatgttagccaggatggtcttgatctcttgacctcgtgatctgtctgcctcaacctcccaaagtgttgggattacaggtttgagccaccacgctcggctccccttcagtttttttttaatttttattttttttgagacagagtcttgctctgttgcccaggctggagtgcagtggcatgatctcggctcactgcattttccgccttctgggtttaagctattcttgtgcctcagcctcctgagtaactgggattacaggcacatgccaccacctccaggtaattttttgtattttcagtagagacagggtttcactatgtttgccaggctggtcctgaactcctgatctcaagtgatccacccacctcagcctcccaaagtcctggaattacaggcgtgagccatcatgcttggcctccccttcagttttattgaggtgtgattgacaaacaaaaaattattgccaaggccagttgtcaaagagctttcccctgtgttttcaactaggagttttatagtttcagatcttatgtttaagtttttcatccattttgagtagatttttatgtatggtttaataagggtccaacttcatattttttgaatagggatatccagttttcctaccaccatttattaaagaaactatcctttccctgttgtatcttcttggtacctttgttgaagatttgttgaccatataggtttgggtttctttctgggctttctattctgttccattggtttctatgtctgtttttatgccagtgccatactgctttgattactgtagttctatcatataatttggaatcaggaagtgtgatgcctccagctttgttcttctttctctagattgctttagctactcgggatcttttgttgtactattaatatacaaatgttaggggttttttttctattttttgtggaaaataccattggaattttgatagagattgcattgaatctgtagattacattggattgtgtaggtattttaacaatattcttccaatccatgaacacaggatatctttccatttatttgtgtcttcaattttttaatcaatgttttatagtttttcatattcagatatttcacctctttggttaaatttgttcctaaaactattttattacttttgatgttactgtaagtgggatttttatcttcattgttttcatgtagttcactgttagtatatagtaatgcaactgatttttgtgtgtttttttttatcctacaaatttgcagaatcatttattagttctaacagttcttttgtggagtctttagggtttcatatatattagatcatgccatctgcaaacagagtcaattttacttcctcttttctcatctggatagcttttatttctttttcttgcctgattgttctaactaggacttcatagttctagttttgttctatgttgaatagcactatgttctagttttgtactatgttgagtagaaatggcaaaactgaggaccgttgtcttgttcctgatcttaaaggaaaagcttttagcttttcaccattaagtatgatgtttagctgtgggcttgtcatatatggcctgtattatacgaaggtacattccttcaatacctaatttgttgaaagttttttatcaaaaaatgatgttaaattttgttgagtatttttcctgcatctcttgaggtgatcatatgatttttatccattattctgttattgtggtatgtcacatttattgatttgtatataatgaataattcttgcatctcagggataaatcgcacctgatcatggtgcatagtctttttaatgtgctactgaatttggtttactgaaattttgttgagggtttttgcatttatgttcatcagggatattggcactactaacatttcaagccagataattcttgtttgttggaggccttgtagaatatttagcagcctacctggcctacaccaccaaataccagtagtacctttccctacttctaacaacctaaaatgtctccagccagatgtcccctaaggggcaaaatcattttcagtcagaaccactgtttagcagtaacctgtaagacaaaagtataccaaaaagtagaagtaactttatggattcctagatcagtgtgttctgctatcactgtcttctaggctgccaggatttacgcttttaatagtgtagtctagtactaccttgccattatgttcagaagtaaatgtgaatttaagttgaatagtagtgttttaaaatatgtaatccaaatattcctaattttttattttattttgttttgtttttagggacagtcttattctgtcacccaggttggagtgcactggcatgatcatagctcactgagaccttaaactcttaggctcaagcagtcctcctgcctcagcctctcaagtagctgagactacaggcctgtgaagccatggcagctaattttttaatattttgaagagactgggtctcactatgttgcccaggctggtcatgaactcctggcctcaagcagtcctcctgcctgagcttcccaaagtgctgggattacaggcatgagccaccatgcttggcctccaaatattagtttaaatgaaagctgctttttctatttaaaattttaaagtgattggttttgaaaactttttaatgttttcatcattataggtgatatctatcataaggtatttttgaaccttgtttttattatactcataaaagtaatacattaaaacagataatggaatatgctctttttttcttcctaccaaaacattattctctaactagatttgtcacccagcttttagtgaattatgagttctcaatattttcatacacttttggaagacatggagatagggaagggggatggcaattcgagtgcataaaaatagtttttactttacatgttgtgactcacttaagtttcattattataataaatgttaaagatattccatctactttttatagtttctgaatcatttgctcaggtataatagttatttgatatgaataaatttgagaaaatattatttaaaatatactctgttacagaatcttcctgccattatttttttaaattaagttcattttattttattgatatataacattttacttatttaatggggtacatgtcatattttgttacatagaatgtgtaatgatcaagtcagggtatttggggtacccatcttgagtatttatcatttttatatgttgggaacatttcaaattctctgttttagctgctttgaaatacataatacattgttgctaactatagttacctactctgctatgccttctatctaacagtatttttgtacccattgaccaatctctcttcatctctaccttcctcccaccccccaccataccctgcccagcctctggtatctatcatcctactttctacctccctgagatcaactttttaaaatttttattttttatatagttttttttatttcaataggttttggggaacaggtggtgtttggttacatgaataagatctttagtggtgatttctgagattttggtgcaccagtcacccaagcagtatacactatacccaatgtgtagtctttcttttttcttttttttgatacagagtttcactctcgttgcccaggctggagtgcaatgccgcgatctcggctcacctcatcctctgcctcctgggttcaagtgattgtcttgcctcaacctcccgagtaactgggattacaggcatgcgccaccacagctggctaatttcgtatttttagtagagatggggtttctccat[139 bp omitted]aatgatgccattatcattatatagatacacagattcgcttctatatactaccattttttccagatatttcataataataatatgtgacctcactaaaatacccctgaatggaaagaaagtcatcatactagtagcattataggaattagaaaacaatgtgcggtttcattttctgatcatcaaggatctggaaatactgtttttctgtaatacgaagaaagcaagtatgtttctttgtatctatgtaaaatcatatcacttatagttaagaataggaagcctaaaatgtatgatttgtttcaatatggatccagaccagttctggtaactttttaataggaggttcaggctgttctgctaaaaaaaaaaacaaaaaaaaaaaacaaaaaaaaaacaaaacaaaacaaaacaaaaaaaaaactatatgtagcatttgatacttaattgtagtaagtactgtcaattctctcctccgtgtcctgtctcgtggcacttaacttgaccaatttatataaaaagaagactttcttctgaaagtagggagtatctcagttttacaaataagcaaacaaacatctggaattgaaataacttgcttaaggttgtggagtttatagcagcaaacctaggtcttttgactccaaagtctatgtttttttttccttcttatcaatgcgagagtacaaagtctattattacctatcattttgccgagaaaattagtatgattagaagggtaagctatgtgggaaagggatggatgtaaaaagttagttgtcgacagtatagggattgagttgaaagaataattagatctgttttctaactaataaatggtaaaaaaaaaaatgtgataggaaaaaacttaatgtgtgagagtttccagccttctgctcttcgtctatgtgctaatgatagttctacctttactaattcaattttttccttttctcctgtctccaacaagggctcagcatttgtcaaactagatctttggggatttgtaatatagacttgacttgagagagagggatgaggtggaaggaatatgaaagtggctgccacaggatcacaggataacctaattatcttgttttgttttgttttctttttttttttttttttttgaaatggagtctccctctattgcccaggttggagtgtagtggcgccatctcggctcactgcaacctccacctcctgggttcaagcgattctcctgcctcagcctccagagtagctgggactacaggtgcgtgccaccacgccctgctgtgtttttttttttgtatttttagtagatacagggttttaccatattggccaggctggtcttgaactcctgacctcgtgatccacctgcctcagccccccaaaggctgggattccaggtgtgagccaccatgcctggccttgttttgtgttttctacttcatactctgtcatggttgcattaaaaaaaattttagtagaggtcttcaaatcttacagtgaatgctgatacctcctaattgtagcagcattagaaaatgtcttatgataattgttgaacttggatacatgagatttaatatgttattctctttacttttgtgcatatttgatactttccataataaaatgattttttggattttttaaaaagaaaatgttttagtgaacatacttgattgctaatttctttctttattcctggaatatcagaactatatcttgtatattactattgtgtatttcagggtgcctaacataatactcattcactaaataaacatctgagttgaaatgaatataatatttagttgcttaattttaaatgtaagttatacttaagtagcagttagtatataaagtgaaaaatgtggtttttggtgaattctataaaggtgagaaaatgttctggaattagataacggtggcggttgtgcaactctgtgactatactaaacaccattgaattatatactttaaaaaagtaagctgtgtagtatatgaatgacatatcaatttttaaaaaggcaatgtaaaaaaatacaaagataagtcataaactgggagaagatacttataacacaaataactcataaaagaactctcacaaatggataaggaaaagacagccctatagataagcagacaaataaaactaatggacatttcacaaagagaaaacacgaataggcaagaaacattttaaaaggtacttaacctcatttgagataaagagatgcaaattataacctcaatgaaataagcatttacacataccagacttacagaaattaaagaattggatcatcccaggtaggcaaaatgtaaaggaacgtgaaccctcatatactgctagtaagattctttaactggtacaaccactttggaaagatgttttggtattacctggtaaaactgaagttgcaaatgccctttgaccaagcagttctactactagcagtgcgtatgtgtgtttatatgtgtatgtaatctgtcctttccctactgattgttaatatcacatttatcaagttatcatattttcatgggtctatttctaggctctctagtatgttaaattggtgatttgtttatccatgcagcaattttatgctggcttatttactataattttaaaataagttttaatgcctagtaggatcatcttctttcagaatgttcttcagggatgtttggctatttctggtcatttgctcttccatataacccttaggatcaatttgtcaagtcttatgtcttgttgggattgttattgaaattatattgaattactttgaattgataggtcattttgaaaataattttctggactgtatttctccatttatttaggtctgtcttaatgtctttaatttaattttacaattttctttataaacttatcatagtcttttgttatatttcttcctatgtatttatgtgtacgtgtgtctgtgtgtttgtgagacagagagagggagggaggaaagggggagtggaaggaggagagagaaaaagagtataaaattaaacatcaactaaaaaaacagctttattgaggtacaatttacataccataaaatttactcattttatgtgtacagttcagtgatttttagtaaatcttcagagttgtgcaatgatcactacaatctaattttagaacatttctgtcaccctaaaaagaaagcttgtgccagtcactcttggcacacttgttggcagtcactccttgttcccatccctagcccgaggaaaccaccatgtagtttaaaaaaaaaaacttattttaagcctttttagtatgaacacttaaaaatacacaaagttgacaaaatagaacaatgactctcaaacaaccaataaggacaatcttctaacttctcacctggattgttttaaaacaagtctcatttcttctataagtatgtcagtatgtgtctccaaggtatgatgatttcttcttaaattgaagtataattttagtttcattatcacacctaaaaagattaacaattttttttttaagagatagggacttgctctgtcactcaggctgtaagtgcagtggtgagatcatagcttactgcagccttgaatttctgggctcaagcctgcttcagcttcctgagtagctagaactacaggtgcgaactaccatatctagctaattaaaaaaaatttttttaatggagaagggtcttactatattgcccaggctggtcttgaactcctggcctcaagcgatcctcccaccttagcctcccaaagtgttgggattacaagtgtgaaccactgtacctggccaaattaacaaaattttttttttgagatagggtcttactgtgttgcccaggtgggagtgcagtggcgcggcttaactgcagccttacctcccagactcaatcctcccacttcagcctcccaaggtagctaagactatagacatgctccacaaggctgggctaatttttgtttattttttttgcccagggtcttactatgtttcccagactggtctcaaactcctgggctcaagcagccctgtagctcggccttccaaagtgctgggattacaggcatgagccactgtgcccagcccccctcatttttttcattgccacttatctgttgaagaaaccagatcatttgttggtagactttcttacattctggacttggctaattgcattcttgtgatatcatgtaatatgcttttatatcatatcttctgtaaaaaggtaattagttctagagcagcacatgctgtgcccttagaaatacaaattacaaatgcaagccacataatttaaaattttctggtagctgcattaacaaaagtaaaaagaaaaaggtgaagttatcttaatgacacattttgttcataccagatattaaaaatattattttaccacgtaatgtacataattattagtaagatattttacagtctttttttgtaccaaatctttgaaatctgttgtgtattttacatttgcaacatttctcaattcaaagtagctacatttcaggtgcttagtagctacgtgtggatagcacagatctagaggtctgattttaggcttgagtttttgtcaagaataattcatatgtggtgctgtgtacttttttgttttttttttctgagacggagtctcactctgtcaccaggctggagtgcagtggtgcgatctcagctcactgcaacctccgcctctgggttcaagtgattctcctgcctcagcctcccgagtagctgggattacaggcacgcgccaccatgcccagctaatttttgtatttgtagtagagacagggtttcaccatgttggtcaggatggtctcaatctcctgaccttgtgatccacctgcctcagcctcccaaagtgctgggattacaggcatgagccactgcgcccggccgctgtgtactttacattgcatttcaacaggaagcaaataatatatatatatttttgtgatgttaagattggtccaaaagttcaagtgccgtcagcctaatcattcagtacctgctgccccagcctttcaccttatggttttagctgcctttgatgatctttgcctagatttatatttcattagtgattcacaatagtgactgtgtaattctttcatttcttctgcatctaatagttgaactgttctataaagaaaaattttctctcatcagttgttcttctactgaagtatttttctgtcgtagttattctttttattatgaattgttatggcccactatatggtcggttttctgttcttttcttttttttgagacagagccttactctctcacccaggctggagtacagtggcacaatcttggctctgtgcaacttccacctcccgggttcaagcgattctcctgcttcagcctcccgagtaggtgggattacaggcacgcgctactatgcctggaaaatttttgtatttttggtagagacggggtttcgccatgttgaccaggctggtctcgaattcctgacctcaagtgatccacccgccttggcctcccaaaatgctgggattacaggtgtgagtcacctcacccagccttgttttgtgaatttggattgtgcatttttatgttcactgatactgtatctcaagatgattttcatattttagctagcatttttaggtgacatgttgaaaggtattcagggtaaattagtgttctatttatctggaatggacggtgttaaatattaatatttttatttaattcattagggaaaaatgggtgaactaatatatctgtaataccataaaataggactctgccttttaacgcagaaaatttggaatttatcctttgcactattgtctcaaaagtgacaatcttcttggcaaccaaattgcattacatcttcaatatctgttattaatttgtatgcattgcgcaatctgaacagaagtggtagaaaaaaattgagacttttttcttttgtattgttaactgttatgttaaactgtaggcatctatgtgactgtgaagtatctttttacctgtctcaataaaatgttactaattattctttaacaggtacaaagtgaattaatttgtgctgtttttcttttttttttgagacagagtctcactcagtcgccaggccggaatatggtggtgcgatctcagccctctgcaacctccacctcccggggtcaagcaattctcctgcctcagcctcccgagtagctgggactataggcgtgtgccaccatgcccagataatttttgtatttttagtagagacagggtttcaccatgttgatcaggatggtctcgatctcttgacctcgtgatccatccaccttggcctcccaaagtgctgggattacaggtgtgagacactgctcccggccaatttatgctgtttttctaatggtaattttgtgtttgcagttcatatccttagctagaaaagaaaaaaaatatataagaccttgctcattaaatcctgaaagataaggaactaaaaataaacacaggacagatgtctcagaattccattttttttttaattctctaataagaatagggatttctaattagccaggtgtggtggcaggcgcctgtagtcccagctaccagggaggctgaggcaggagaaaggcatgaacctgggaggtggagcttgtaacgagcccacattgcgccactgaactcccacctgggcgacagagcaagactctgtttcaaaaaaaaaaaaaaaaaaaaaaaaaagaatagggagttctaatatagtctgttcaacaactgtataatagaatccatagcaggagatatgtttgatagtagttctgtcataagaaaatggtaggagattgaagtcgttgcacatcattttagtccaaatgtcatctgatcacctgaggtgcctagaagtatttactttcttacattgtttgagggatatatttttgttttaaccatgaatagcacacactgttttattttatttatttatttttttgagatggagtcatgctctgtcgcccgtgttggggcatgatcttggttcactgcaacctcctcctcctgggttcaagcaattctcctgtctcagcctcctgagtagctgggattacaggcacacaccaccatgcccagctaattttttgttttttgtttttgttttttagtagagatcgggttttgccatgttggccaggctggtcttgaactcctgacctcaagtgatccacccgcctcagcctcccaaagtgctgggattacaggcatgagccaccgtgcccagccacacacttttttatttggtagatttcctcaagtcttttcagaagcaagtgaaatacaaatcatgaaaaatgaaaaagaatattattcttcctcccttcaatctctgtggctcagtcttaaggcccaaacagtgatacatgtttgttttatggcagtagtcataataatttgtgatgtggcagtgagagatgagggaaatattttgaatcactgcctacaagatatgatgttcattattgttctcaagttatttcatatgtttattctttctcccctaaagaaaacccaggatcttttatggcaggcactgtcttctacttttatgtatctctatcctctttttgtcagacttcaggcccatataaatttccagcttgtttaaaacatttttgccttggctaccttgtacaatgggatctttttagcctctttcttatgaaaacctcataccttggaatttctcttactattgatagaaaaattatgcacatggtagagaaaagctcaatctaacttgtcttcataggacttccatatttagggaaagaccctaagatgtcgtgctggatcatttgctttttgatatatccagattgctccttatcccaatgaaaacagataaaggaggttgtactgtaattagctaattctgtaattcttgccaagatagtaggggttgttcattgtgaacacattctgccacaacagctgaggtagaacattgtgtttatttgtgagagaatttgagtatgaacaatttggtttaaagattaaatgggggaataaattatattgataaaactgatgaaatattttattaaaaattactaagttacacagaggagtttacatttaaagcattaaatatactgaacattgtagaaattgaaaattctgtctgtatttcatttggaagagtttctggctttcctcttgcctttttgagaagtagacatatgtactggaggcaacctagcttggtgtgatgagcaacagattggaacacagagcagcactaggtgtacagtgtcaggaagtccaactcagtgggtgtttgttatgcacaaggaactttgacaggcattattgtgggagagggtggttgaggtggatataagcatgaataagaaatagtcccctaaataatgtaaaataataatgtaatggaaatggaattagataagtaaataatagaaaatagaatgaaacatgttaaacagagtttccaataacatgctaaagaagaacacaggaaaaagcagtgaatattgattaggaaatcagagaagatgtcattaagaatatagcttctaagttgattctagaaaaagagtagtattttgttagatggaagatgggaataggagtgtgaagatctctttttggaggaactggtaaatatggaggcatgcattgccaagacaccaattttattgaaggataaaggagaacataaggtcaaactatcagtgtttaatatttactctgtaataattaacatttctgtaatatttttatatacacatttgagacttctaacaacagccaagggagctatgtattactaccccaatatatacatggtcctgtgtaatttaatggaaggctctggatttgaaggctaactttgtcacttaaaagctatgtgaccttgagtattatttgatattactgaatctcagttttctcatctaccagatacagataataccttttcagtaaatcacttcagggctgctgcatagactgtacagtgcattattccaggggtggtgttcacacagaccaggggttgacaatgttttttttctgtaaagagccagatagaaaatattttaggctttgctggccataaaccataagaaagctgtcacaccaactcaaccttgctgttatagcacaaaaacagccataggcaatatgtaaacaaatgggtatagctgtattctaataaaacttcatttataaaaatagattctgggccagatttggcccacagtttgaagtttgctgactacataggccaggatgtgaatggtgaaccctttagttgtgcaattctgtgatacaggttgttttaaggaataaattacttatagcacagaaatatttctagcttagtacatgtgaatcctcaacgataaaagtctatatacttttctttctttcctttttaaagttattgccattgaattcttgggtaaaccacttaaacttttgccctctatttacttcagaattctcagtagggaaataaaaactatcttttaccagattaactttaattaggtgtatgagttagagtgataataggtgactgttgttttgaattccttaaagtcaatgttaactagaaattataagacattattatagctgaatgccattgtgttagcagtcttaactacaacataacagggaacctgaagcctaaactaatggcactatttggtgtcttatgtgatttgctactatttgtaaactaaaatttttacctggagaatatttattgttttggatttcagcataattagcatatggtcctgattttggtacccacgacatagtttttgtcagactgtcattgcatcattcttgaaatatagctaataattgaaaagaaagagtatgcgttcttttagagatacctagaaagagtggggaggatgtgaactttcttttgctcttacttattatagctctgttaatgctgttcctttcaaagaatattttctaaggtgtttttccctcggtgctttgaaaagttttcatatcagattatgtaaatcaaatgtcgattatgtactagagctgattttgacattgcttttgagtcttagtttaggaataacaaactaattgcaagttttaggatattatatgctaatcattattgtgagaagattatgatgttgaattgccatacataattctgttttcccactcttaatgataagagagattttttatagttgtcattttaactgtggaataaagggtttcctattttcatatttgaaaatatttccttccccttactccatatagaactatcacgtacattctacctgcattatgataaaaaatattgataaaataaaaatattgatacaataaaaaattttaatcataatgcagatagaatgtgtataatatttctttttttttgtttttttggagtcggagtcttgctctgttgcccaggctggagtgcagtagcatgatctcagttcactgcaacctccgcctcctgggttcaagcagttctcctgcctcagcctcctgagtagctgggactacaggtgcgtgccaccacgcccagctaatttttgtatttttagtagagttggggttttaccatattggccaggctggtctcaaactcctgaccttgtgatccgcctgccttggcctcccaaagtgctgggattacaggtgtgagccactacacccagcctgtatgtaatatttctatatggagtaaagagaaggaaatactttcaaatatgaaaacataaaatatatataacataaaatttattattataatcatttttgagcatacaattcagtgacattaggtacactcacaatgttgtgtaatcatcaccaccatccatctccaaaactttttcatcagcccaaatcagacttcatacccattaaacaataactttccatttcttccttcccccatcccctgccatcccctagtaacctctattctacttttcatgtctatgaattgcctatttttggtctaggtactgcatgtaagtgtaatcatataatatttgtccttgtgtgcctgtcttatttcacatagcataatgttttcaaggttcatgcatgttgtagcatgtatcagaatataaatatatatatatatatatatatatatatatatatatatatatatatatatatatttttttttttttttttttgagacagggtcttactctgtcagccaggttggagtgcagtggcgcgatctcagctcaccgcaacctccacctcccaggcccgagtgatcctcccacctcagcctcctgagtagctgggcctatggcgcatgaccaccatgcctggctaatttttttgtatttctggtagaggattttgccatgttgcccaggctgggctgaaacccctgagtggaagccatctgcttgccttggcctcccaaagtgctgggattataggtgcgagccaccatgcctagcctcagaatctcatttttaaattactgaataatttcaattgtatgtctataccacatttgatttatccatttatctgttgaaggacacttggacattttcacctttttgactattgtgaataatgccgctgtagaaattggtatacaaagtatctgttgagtccctgcttacagttcttttgggtatatgcctaggagtggaattgccggatcatatggtaattctatgtctaatcgtttgaggaactgccaaacgttttcacagtggcatgcattgtgctttaacagatagtttgggaagcctttttattaccttatatttaaaatgtttactgtttcattttaaaataagaaaatgttttggaatttcataaattgttatcatttgggggtaataacatttctatatttgcctttttagtactttttaatttttccaaatttgaaatattaaatactgatttctttgacatacattcactgagaagttaaaaagatccttgcattcagcaagtgaaacatgctgtaaataaatcatgttacttctctattaacagttaacactagggactcccaagcattctgaaacttgtatgataacaaaacactagattttccttatgtcctagaaaatgcttgcatttctcaaaaagaatacactctagtttttttttttttgagacagagtcttgctctgtcgcccaggctcgagtgcagtggcacgatctccgctcactgcaagctccgcctcctgagttcacgccattctcctgcctcagcctcccgagtagctgggactacaggcgtccgccaccacgc[156 bp omitted]tgtactgtctctagttcattatgggtaccttacttgaaaagtaaacaatattaaacaggaaaaaaatgagacagtacttaatagcagttaagcattatggagtatttactgtatgccagaccccatgctaagtaagcacattaatttaacctcacagcaatgcatactgggtgggagctctcattgtctttatttaacaagtacaaaacttgaggcacacaacagaggtttaacagagaggttaaataagttgtctgtggtcacacaagtaacaagtagtagatttatatttaattcagaacatctttatctacaagcatattttaggactacatgttggcactgatgaaaataataaatagatctttatccctatcttttggagtttacagtaaagatgagcccaaaacacttaatattactgttgtaagggcatagctaaaaaatggtaattggaccttaattatagagatttgagggctacttattcccatatataagctttacttagtgtaaacttttgatatagaccccaagttcattatttgcttggtatttcaggtactggcaacccatatatgagccaatgataattagatcacctagatcttggtttaaatttattactgacaccacatccttctcgttctttattatttttgagtgcttctctacctccttgaaatgctcttgctttctggaaaaatctctttatgtaaactccttaagggcaagagtctgtgatagtgcttggtacataattagtactcaacacgtatttgctgaatagccaggtgcagtggcacgtgctggtagctgcaactaagtcaggaagctaaggtggaaggatcacctgaggtcagacatttcaggctgcagtgctgtatgatagtgatgtgaatagccactacactccagcctggacaacatgggctccgtggctaaaataagaacaaattttgataaatacatatattgtttctctttataaatctttatcaaataagatgatgaaatccaaaattgtaactgttattatggtggttgatctctgccccccaattttccacagccgtatttctatttatttatttttttggagacagtctcactctgtcacccaggctggagtgcagtggtgcaatctcggctcactgcaatctctgcatcccatgttcaagtgattctcctgcctaagcctctcgtgtagctgggattataggcacgcgccaccacgccaggctaattctttttgtatttttagtagacacggggtttcgccatgtaggccaggctggtcttgaacgcctgacctcaagtgatccacctgcttcagcctctcataatgctgggattacaagcgtgagccactgtggccggcccgccatagccatatttctaattacattttttgtttcttgaatatacaagaagtactataactgtattaatctatgcttgcattgctataaagaaatacctgagactgggtaatttataaacaaaagaggtttaattggcttacggttctgtaggctgtacaggtagtatagtggcttctgcttctggggaggcctcaggaaatgtacaatcatggtggaaggcaaaggggagtaaggcttctggcgtggtgcaagtaagagagagggcaggagggaggtgctacatgcttttaaaggacatgttggggccaggtgcagtggctcatacctgtaatcgcagcactttgggagacagaggtgggtggatcacctgatgtcaggagtttgagaccagcctggccaacatggtgaaaccctgtctctactaaaactacaaaaattatctgggtttggtggtgggcacccgtaatcccagctacttgggagtctgaggcaggagaacggcttcaatctgggaggcagaggttgcagtgagccgagatggcaccactgcactccagcctgggagacaaagccagactccatttcaaacaaaaaataaataaataaataagataaataaataaaggacatgtcttaagcgagccctcactcactagtgtgaggagagaaccagggggatggtgctaaaccattcataaaaatccacccccatgatccagtcacctcccaccaggccccacctccaacattggggattacaattggacatgagatttgggtggggacagagttccaaacctatcaataacaatgataaacggcatgaatttttatatcagacagacctggaattgatcctggctccacttactaattttgtgtgaccttgggcaaggtacgaaacctctccaacctccagtttctcctcaggaaaatgcagctgataatagtgctatctcacaggattgctgccaggattaaagaagataataataatacatgtgatgtgctaagccatgttcaggacccattaatgtacaatgaatttttggttttttggtttcaaattagttgagattcaactgtaaaagacgtggttgaagtcctaaaggagtgtgcttattggacctacaaataggagatatgtgtataaatgactttaaaacactgacagactatatgaataagttaaaatgaataaggtagagactgaatatacatcaatgactattatttcattatagggtccaaatggtgctagaagctcaacaaaattattgtccatgtgctgttatcttatttagatatacaaacaatttaaaataaatgtatttaaattatatcataaataaaataaattacttgtgggagtgagtcataattaatgattatagtagcaatggtcctactaattttagacaaacagattgctgtgctatatgaacaactaactatgaagactaaatagataccaaattctgttataataaagtaaaacataacttgatctgaaacatttaatcatgggcttaattccaattataatgtatgatgtttaaagtataagtgataagttgttcacataagtgattattattatatataattaatattataaaccttcagcttagctttgtatttttgtttgtttgtttgtttgtttgtttttggtttttgg[322 bp omitted]tactagaaaaagaagaaagttttttcatttcaatatgaagattcctacattcaagccccttttccaataggcgccactcagagatcagaataatgacacattctttggtatagatacacacactctgggtgtttaagttagcttacggcagggcaggaacttgcccgatataatagaaagaattcctttgattgagaagcggatactggttagcaaggaccttggaaaactagtagaagagatggaaatagagtaataaccgaagtcttctttaacaatgaagaaacttattttgagactccaggggttggagaaagggttttcctgggctttagaactccattgttatttggtaaaggctgggaggggagtgggctgaaagtatgaaaactgtcctttcccaaatttctcccccatcttgtctaaaatgaccaattattcaacgcttatgcagcttttagtataaactagtttagtcaactagcttttctaataactaactgagatatatcaaggtaatgagattttgaaaggcgatcaaggaaaaagcaaaatatcgttttaaagcataagttgttgatgaacacaaagctttaagtgggagctggcagcttcaggaaggaatctggcaggaagaagaccaagatagcccagagagtgatgaggattactaaaacaagagatggaaagaagaatgtagtaaaggagttgagcaagtaacaacagcaaaaaaagtgaaaagagaccaaagaaaaggaggcactgaagcatagcattgaatgaagtacatatgcaactaggagcaagcattataaaatatgagcagcagtgtgggttgtttacttagaagtaaagttgctaagtctgaatttatttttatttatttatttatttatttatttatttatttatttatttatttattttttgacgagtcccaagtatctttctccaaaacaagagggaataccagctgacttctgattctgttataggttaagctgataattatggttagaacctctaggtgtttgctatattgttagctagtaggaagaatgttggaagattggagccagtttcaattgcccatctgttctggtcttatactaggattaagtgtttactaaaaatagaacggggtaacattgccaaacgtgtagcccataggcatttgtaaacttgctctcttattaagataattcatgctttaaacactggttggccatgaattgaagatgtaaagatgaggatttaataggtagtttttttctggaatagatgatatgctttttttctgtggggaaattctaattacaacaagcataggtttaagcctctggctgataattaaagttatgctatcagtcaggtcttaccgtactgccagtacttgctgttggagagagaatagattgtaatagattctgttgttcagggtctgtgacaactgaagcctgccaaagtcagttgcgccattctctcctctttgtcatatgtaagtgaggcagcaaagtattgtgaaaaaaatatgtcaagagagctgacttatacgatgattattgctcttcttgtttgacctggggcaagcccttctgagcattttttttttaattttcaaaatgaaaataatacctattttatccaagtggaagcattattgtagagtcagacattatagtgtatgtaagcactttttaaactataaagacaacgtataaaaatgaggttttcatttctatcacctaagaattgtttctagtttaagagaggctgaaatggtcatatttctgtcatgtaggcatttctcataaatttttcaaggaatggaatgggcaggaaaggaactatgaaagtaatggaaaagaatcatgtgggtatttgcatgaaagacagacttacttgaaattctaggcacaggaatggtttctcaggattgtgataacgctgttctctgaaagatttaggtgaaaaggcaaagaccttatttatgattagatatgttttatatcaaaatatgacagtaatgaatataggagaatgaatcttatgcatctatagttactctttgaaaataacattgctggctgctatctgaatcacctgttgttcagttattttttttcccttaggaaattgtgttttgtatatttttaaattattgtaaaatgtctgcaaaattaatctgcaccacaggaaagataaaaaataaagaaaaacatctgcaaaattaagcattgattagattaaatatggacgaggtgcagaatttaaatttatttatttatttattttttgagacagagtcttgctctgttgcccaggctggagtgcagtggctcgatctcagctcactgcaagctctgcctcccaggttcacaccattctcctgcctcagcctcccgagtagctggaactacaggtacccgccaccacacccggctaattttttgtatttttagtagagacagggtttcaccacgttagccaggatgatctcaatctcctgacctcgtgatctgcctgcctcagcctcccaaagtgctggaattacaggtgtgaggcaccgtgcccggcctgcaaaatttaaatttaatacaaatttaatggactatccccaaatatatggatgtgtagaatattatatatgtttttaaaacatgagttagagaaagggttggagaaagggtttgaaaggagatgagcacaaagatgaatatctccaattcaaggtagaaaatgtacataacaattatcagtcaatacatttatttatatataatttaaaactttttttctcatagaaaaaatctgtaggttgtcctaaatatagcagtcttaatctaaataatctattgaaccaatactttctgagactttacataggcacagatcctatctgagaagctgctaatcaactgctacactgctgcaggataaaccttttatttttataattttgtgtactcaaaagcttatatcagtgaagatagatatttcttcaatctaattactattagttattttaatggaatcaatcactttgaaaagaggattcaggtgtaaaagctttattctacttttattaatgaatttaggttgctttagctgctaataatgctgttgtttgcttctttctgttgtttttttttttttgagacggagtctcgctcgtcgcccaggctggagtgcagtggcgtgatctcagctcactgcaagctccgtctcccgggttcacaccattctctggcctcaggctcccgagtagctgggactacaggtgcccgtcaccacgcctggctaattttttgtattttttgtatttttttttttttttcagtagtgacagagtttcaccgtgttagccaggatggtctcaatctcctgacctcgtgatccgcccgcctcggcctcccaaagtgctaggattacaggtgtgagccactgcgcccagcctgcttctttgtgttttatcttgcattgtattactgtggagagaagcaattcatttaaaatatctggctgatgcaaaggcataagaaggacacaatggactttggaaacttggggggaagagtgggagtggggcgagggataaaagactacaaatatggagcagtgtatactgctcgggtgatgagtgcatcaaaatctcccaaatcaccactaaagaacttactcatgtaaccaaataccacctgtacctcaataacttacagaaaactaaaataaaaaaaagaaaggcttgaactattgattctcacacacacactcacacacacacacacacacacacacacacacacacacacaaaaataaatagaatgaaatatctggctgagtgtagtggctcatgcctgtaatcccagcactttggaaggctgagacaggaggatcttttgagcccaggagtttgagaccagcctcggcaatattagtgagactgtctctacaaaaaattaaaaacaaacaaaaacttctgaataaaatatctaagcgtttttcaattcagaaaaaacttaacagtttagaaagctttgtgttaacattggtgttttttttttcaggaaacaaatgaaaacgtattttttttattctctgttgttttttgttgttgttgttgttgtttggaaacagagtctcactttgttgccctggctgtggtgcaatcttggctcactgcaaccttcacctcctgggttcaagcccagcctcagtctgattctctagcctcagcctcccaagtagctgggattacaggcacccaccaccatgctcggttaatttttgtattttaagtagagacttggtttcaccatgttggccaggctggtctcaaactcctgacctcaagtgatccacccaccatggcctcccaaattgatgggattacaggcatgagccaccgcacgcagccccattctctaccttattctatatagttttactacattttaatatttttagatataaatgtagaaattatagttttagttttaatggttcctgacatttttttttaagtttattcagagcaaatgaaaactgcttttaggccaggcatggtggcttatgcctgtaatcccagcactttgggaggctg[134 bp omitted]ggaggctgaggcagggagaattgcttgaacctaggaggcagaggttgcagtgagccgagatggctccactgcactccagcctggcagcctgggcaacagagacagactcgatctcaaaaaaaaaaaaaaaaagaaaagaaagaaagcggctttgatgttttatattatgaaagaaatttagctggacagatccagctgttgcatttataaatagctacagatatctacagcaataaagggtttattcaggttgttatggcaactaaaattcagcagaacttcaaagataaactatattgaagcaagaggtacattaactgtacatttaatcaaattatacaataaaattgttgcttaatatatcattttagatagcaagaaattagtttaacatatcaatgtaacttactatttttaatgtacaaatattttgtttttactcttttattttttttagatggaacctggctctgtcgcccaggctagagtgcagtgccacgatcttggctcactgcaacctctgcctcccaggttcaagcgatttttctgcctcac[135 bp omitted]cagcctcccaaagtgctgggattacaggtgtgatgtacaaaaattttgttcctaatttatctgtatgggttttatatacttttaaggagctttacttataggaatgatggatcatgctgacccatttaaaactctctttctcggtcttctttgtaataagttgcatgcttatttagatctgctggctagggttgagggtacatttc[132 bp omitted]atctccgcctcctgggttcaagcgattctcctgccgcagcctcccaagtagctgtgattataggtgcccgccaccatgcccagctaattttttgtatttttagtagagacagggtttcgccatgttggccgggctggtctcctgacctctggtgatcacctgccttggcctcccaaagtgctgggattacaggcatgagccaccacaccaagtgctgggattacaagcatgagccactacacctggccaaaatccatgatcttataccaatgttttatccaacttaactacctggttataatcttttaagccatttgaatatgtagatttattcagatattctgttacagtgggtctaggagtgggacatgag[175 bp omitted]gtggcgcgcgcctgtagtcccagctacttgggaggctgaggcaggagaatggcgtgaacccgggaggcggagcttgcagtgagccaagatcgtgccagtgcactccaacctgggcgacagagcgagactccatctcaaaaaaaaaaaataataataataataataataattggccaggcaaggtggctcacgcctgtaaccccagcactttgggaggttgaggtgggcagatcacccgaggtcaggagttcgagaccagcttggccaacatggtgaaaccccgtgtctactaaaaatacaaaaattagccaggcgtgatggcaggtgcctgtaatctcagcttctagggaggctgaggcaggagaatcacttgaacctaggaggcagagattgcagtgagctgagatcacgccactgtactccagcctgggcaatacagtctcaatctcaaatagtaataataataatttttatttttattcaatgtaatatgtgtataatttttaaaagtgaatagtgtactgtaaagcatatactaagaacagtctcttacccttttcttcttcattctcaagtcctccttggaaacaactattttaattttcttttctttctttttctctctcttcctctcttttctctttctatacattggaaccacaatggcaaaggaagcaactatttttaattctttttgtttgtttgtttgtttttttaagatggagtttcactcttgtttcccaggctggagtgcaatgccgcgatctcgcctcaccacaacctctgcctcctaggttcaagtgattctcctgcctcagcctcccgagtagctgggattacaggcatgcaccactacgccaggctaattttgtatttttaatagagacagggtttctccatgttggtcaggctggtctcgacctcctgacctctggtgatcctcctgtcttggcctcccaaagttctgggattacaggcatgagccactgtgcctggcctatttttagttctttgtttcttctgggatttacctgtctctaaagaatgtttcatttgctgtttcttgttttttaaattatagacagtaactctttgttttttattctagaagataaagatttaacaattttatacaactcctgctaccacttactttcccccactaactcccagtataatcataccacaacttcaggcaaaataatgtttacattgtttgaattatgtatatattgtttacaactgagccactatatactgtgtttacattttcttttcttttttctttttttttgagacggagtttcactctagttgccccggctggagtgcaatggcgcaatctcagctcactgcaacctccgcctcccgggttcaagcgattctcctgcctcagtctcctgagtagctgggattacaggcatgcgccaccatgcctggctaattttgtatattcagtagagacggggtttctccatgttggtcaggctggtctcaaactcccaacctcaggtgatccgtctgcctcggcctcccaaactgctgagattacaggcgtgagccaccgtgcctggcccgtgtttacgttttctttattgtataaccttttgtttttcctggagttaataatttactatttttcatttgtttagttttctatgtacctattgtcctttattttctgaactctgcagtagaaacataaaaaccactatcagtatagttaaacatcctgggtaatcattttttataaggctttcatcttggaactttgcatctgcctgttccagtccagactgtacgtgctgtataccttctgtacagctgacattctggagctctaccatgatcctcgtggttcctgatgcttctttttcatcagagcctcagttttgtggttttcatttctttctgggtttcttttctcattttgctggtggacatcctttactagtctttttataaaagattcatggttagaaagcaggattagtgagcttaaaaaaacaaataaaagattcatggaagttaatttttttcagatatttcagttaattttgttaacctgaaatatctttattccactcctccacttgattgttagcctagttgggtacagaattacaggttaaaggccaagcgtggtgggtcatgcctataatcccaataccttgggaggccaaggcaggtgaattgcttaagacccagagtttgaggacagcctggtcaacatagtaagaccctgtctctagaagaaaaattagccaggcatggtggcccatgcctgtagtcctagctacttgggaggctaaggtaggaggatcacttgagcccaggagtttgaggctgcaatgaactctgattggatcactgcactccagcctggaaatcagagcaagacactgtctctctaaaaaaacaaaaaacaaaacgaacaacaaaaaaattgttagaaaattgttttcccacagaattttgaaggcattagtctgttgtccctcagctttcactgttgttgttgttgttgttattattattattattattattattattatttgagatggagtctcgctctgtcatccaggctgtagcgcagtggcgcagtctcggctcactgcaagcttcgcctcccaggttcacgccattctcctgcctc[134 bp omitted]gtctcccaaagtgctgggattacaggtgtgaaccactgcgcccagccttcagtgttattattgagaaagatgatagcattctgattcctgaacctatttgtatgtggtttactttatttttttttattttttattattattttttgagacggagtctcactctgttgcccaggctggagtgcagtggcatgatcttggctcactgcaacctctgcctctgggttcaagcaatactcctgcctcagtctcccaagtacctagaactataagcgtgtgccaccatgcctggctgatttttgtattttttgtagaggcagggtttcaccatgttggccaggctggtctcaaactcttatcctcaagtgatccacccgccttggcctcccaaagtgcttctattacaggcgtgagccaccctacctgacctgtatgtgacttactttatcttttttttttttttcgtttttttgagatggagtctcactctaatcacccaggctggagtgcagtagcacaatctcagctcactgcaacctccgcctcctgggttcaagtgattctcctgcctcagcctcccaagtagctgggattacaggcacgtgccaccacacccagctaattttttgtatttttagtagagatggggtttcactgtgttagccaggatggtcttgatttcctgaccttgtaatcgtccaccttggtctcccaaaatgctaggattacaggcgtgagccactgcagacttaaaactttatcttaaagcttttagactcttctctttagccagcattttgggaactgagtaagggaatacacttgtttatatgtaacttttcacatagtattcttaattttagtaaggtgatttacttcagtctctcagtatataccttgtgtctttgaatattctgtttcaattaatcagaaaatgaacattttctctcctgccatgtgagggaggtgcacttgtttggttgcatgggagtttagaagaaaactatcttaggtatttcttctgtataatttcaatgaattgcaacgtttccaacacttctccttatacccgctgtctgagatagctagtatctccagttccttagattcctggagttctttgatgagaaccagctagattcttgatgtcatccccctattggacagtttggactcagctttctctgttctggtatgttaaggttgctactccttcattccctttcttgctttcaaatatttgttaatcttttttgtctactatcatttcttccatgtctttctgttattttaatttcacatttcaggaggtttctgagataaatacatgtgtgcagtctgctattttgaatcagaagtcctgaaagtccaacattattgccagtgcttttattgtttctgtgataggcactgtgttccaaggcagctcatttcctctttggtaagcactgttttttagtggctgcttatcttgggtgaaagtctttgtctctgtaggactattgatcctaattctacaccttagagtattccaaataaatctgttgtcttccacttggtaacctttcatagacttaaagacagtattagaactttagtattttttcttctctagcgtagagataacctagtttctctatttgatcctcagaaaatactgtttcaaatttcttcactatcctggtcactcacttctgaattaactgttcttaaagaatgatacctggaattgagagcaatactccaggtagaatctaaccagcacagactagagtaaattattatcattttcttttgaaatattgttgtgataaaaaaaaataaacctagcactcctggtatgttctgcaaagggaagagtttctcagaattttatctgcttgaaattaaagaaaaaatgtaaagcttctactacttctatatatagagagagagacctgaaacatacaatgattttgttttgtttttaattagatcaattggtgctcctttttaaaaataatctggagtgtaggttgagaattaagatgttctgcataataacgtaacatgaaattttaaactttaattttgaaatatttttagagtcatgtagaagttgcaaaaatagtacagagttcagatgtactcttcacccagcttcccccaaagacatcttatataaccatagtataattatcaaaatcagaaaactgacattggtacaatactatttattaactaaactactgaccttatttggatttcaccaggtttttgtttgtttgtttgttttttgagatggagcctcgctctgttaccaggctggagtgcagtggtgtggtcttagctcactgcaccctcgcctcctgggaacaagcgattctccttcctcagccatctgagcagctgggatcacaggcatgcatcactactcctggctatggctaatttttgtatttttttcttttagtagagacggggtttcaccatgttggtcaggctgatcttgaactcccagcctcaagtgattcacctgcctcagcctcacaagatttcacagttattatatacaatccttaaaaaaaaatgtttgggggatgtatgtagttctacaggattttatcacatgtataaattcatatgaccattatcacatttgggatatagaactcccaaagaaactcccatgtgctagccgtttacagtcacaccccaatcctaacccctggcaaccactgatctgttttccattaccatacttttgttactttgagactgttatgtaagtggaatcatctagtatgtgaccttttgaaacccagtagtttttcaacagttacctcaccgcacccccacagaagtctttagtttctattgttgccgtttttatgtccatgagtaccccatgtttagctcccacttataagtgagaacatgtggtatttggctttctgttcttgcattaattcacttaggataaaggcctccagttgcacccgtgttgctgcaaaggacatgattttgttctttttttatggctggatagtattctgtggtgtatatgcaccacattttctttatccagaccacatctgatgggcatctaggttgattccacatctttgctattgtgaatagtgctgcagtgaacatgcgagtgcatatgtctttttgatagaattacttgttttcttttgggtatatacccagtatgggtaatcggattcctgggtcaaatggtagttctgttttaagttctttgagaaatcttcaaactgctttccatagtggctaagctaatttgcattctcaccaacagtgtataagtgttcccttttctccacagcctttccgacatctgttgttttttgactttataataatagccattctgacatctgactgatgtgagatggcatctcattgtgattttgatttgcatttctctgatgattagtgatgtggagcattttttcgtgttcattggccagatgtatgtcttcttttgcgaagtgtctgtgcatgtctttcgcccatttggaagtgttttgtggttcttgtagagatatttcccctctttgcttagatgtagggttttttgtttgtttgtttatttgttttatttttattttttggtggggtgtggggtatggctattgtaaatgggattgcattgttgacttgtttgcccactttttaattggactgcttacttatttacagttgaggttagggatttccttattgattctagatataaattatttctcaaatatatgtgatttgcaaatattttctcccaatctgtggcttcttttctcattttcttaatatctttcacagaggaaaagttttaattatgatgaagtctaatttattaattttttcctttatgggttgtacttttggtgtcatatctaagaacattttccctaaatttaggtcacacagagtttctcttgttttttccctaagagtcttatagttcaacatctgataaaattatgcatttgaagtttgttaattttggtataaattgtgaggtttaggtcaaggtccattttgtctcctacaggagaccagttgtcccatcaccacttgttaaaacgactatccttgcttcattaaattgcttttatgcctttgtcaaaaattggttgtctgtacaagtgtgagtttatttttttgctcttttttgttctattgatctgtgtgtctgtctcccaatacgaccgtttaactgttgtgcctctatagtaagtctttaaaaagctaatgtgattacccttattttattctttttttcaaaattcttttagctattctagttcctttgcctttccatataaattttagaatcagcttgttcatgtataaaaatctgttaggatttttataggaattgcattaaaccaactgcagatcaatttcgagagaattgatgtctttactctctaaagcctccgaatccatgagaatgccacatctctccagttatttaggtcattaaaacctttttttggcctggtgcagtgactcatgcctataatcccagcactttgagagactgaggtgggaggatcacttgagcacaggagttcgagaccagcctcagcaacatagtgagacctcatctctacaaaaaatagaaaaattcgccaaccatggtggcacgtgcctgtagtcccagctactggggaggctaaggcgaggtgattgattgagtctgggaggtcaagggtatagtaagccacaatcatttgtgccactgcacttcagcctcggtgacagagcaagaccctgtctcaaataaagtaaaataaaattcatcagtgttttgtagtttttggcacacagatcctgtgcatgttttgttatatttctacccgaattttaatttttttttagtgttattgtaaatgttctgggaaattttattacctgtcatattgttgggccttcccactgtagctttatattttattaaaacatatatttttgactgagttcagtggctcgcacctgtaatcccagcatttaggaggttgaggtaggaggattgcttgagcccaggagttcaagactagctcaggcaatatagtgagacctctatctctacaaaaaatttttaaaaattaggcaatatagtgagacctctatctctacaaaaaattttaaaaaattagccgtgcatggtggtgcatgcctgcagtcccagctactcaggaggctgaggcaggaggattgcttgagcccaggattttgaggctgcagtgagctatgatcatgccactgcactccagcctgggtgacagaacaagaccccgtctcaaacaaaaaaacaaaacaaaaacaaatggggcgctcgcttcagcagcacatatactaaaaatgatagagaagattagtatggtccctgcacaaggatcacactcaaatgttacatattataatttaaaaaaaatggggaaactgagacttagaacagtcaagtaattaattgcctaaggttacaaaattggtaaacagtagagctaggattcaaacccaggtgtggctttagaatctctaacatgatgctaaccactatacaatgctgcccagagcaaaaccatcctgatatactctaacagcaactgttttttaagttttgggtatatattgttgctcaaaagtgacaagactactaactttatcttttgtgttacccagattaaaattctttcaggaaaaaatgaactatatataatattaagattaatgtatttcatcatctgccttcttcttatctaaatcaaagaattcccagggggcctggcatggtggctcacacctgcactttgggaggccaaggtatgaggatttaatgagcccaggagttcaagaccagcctgggcgacagagtaagatcctgtctttacaaaaaaaaaattttttttttcttgagacggagtcttgctctgtcgcccaggctgggagtgcagtggtgcaatcttggctcactgcaacctctgccgcccaggttcaagcgattcttttgcctc[339 bp omitted]gaggc[133 bp omitted]tgagccaccgtgcccagccacaaaaaatttaagatcaactgggtttgttggcgcatgcctgtagtcttagctactccagaggctgagatgggaggatcacttgagcccaggagcccaggagttggaggttacagtgggccatgatggtcccactgcactccagcctggctaacagagtaaaaccctgtctcttaaaaaaattaaaaaaaaaaaaaaaaaaaaaagaattcccaggatatacaactgtcagagaatgagaataacacacacacatacacacacacacacacacacacacacactaaatctctcattatccttaatagttacaaattgatttcatttttatttaagattactcagaaaaatttattggacttttaatttatgttaagaaattgttttaaaaggccatcagaaattctattaaaatcatgaggcttttttttttttttttaagacagagtctcacacagtcacctagactagagtgcagtggtgcaatctctgctcactgcaacctctgcctcccaggtacaagtgattctcctgcctcagcctcctgagtagctgggattacaggtgcccaccaccactcccggccattttttgtatttttagtagagacagggtttcaccgtgtcagccaggatggtctcgatctcctgacctcaggtgatccacccgcctcggcctcctggaatgttgggattacaggcatgagccaccacaaccagcccatgaggtttttataaattatatgtgctacgcatttgctaatttagacaatgtagtgtgctgtttataaaagttggcagcatttgagaagttaatcttgactctgtctcatgtccagccagggctgttagactgtcccagagaaggtgatgatcactgacaataacgtgttgataaatctttgaagcctttcaattaagaaagtcctctggaatgtaaacatagatgttatacctgtcacaaaaactaacttaaaatagatcatacacataaatgtaaaatgcataacttataagacttctagaagataacataggagaaatctagtgaccttgagtttggccatgagttttagatacaactcaaatagcatggaggaaaaacattgataaaattgactttaaacttgtgttctgggaaagacacagtaaagggagttaaaaggtaagtcacaaactgggaaaaaatctttgcaaaacacatatctgataaaggacttgtacccaaaatatacaaaaaacacttacaattcaacaataagaaagtgaacaacccaattaaaaagggagcaaaagatctgaacagacacctcaataaagaaaatgtagagacagcaaataaacactaaaaagacgctcatcatttgtctttagggaattgcaggttaaaacaatgagataccattaaagtctgttagaatggctaaatttaaaaactgaaaaactggtgaggatgaaaaacaaaagaaactctcatctttgctggtggaaatgcaaaatgatatagccactttggaaaagagtttggcagtggcttacaagaaagataaacatattcttaccatatgatctagcaattaatcgcatttctaggtgcaatagacatacccagttgagttgtaaacttacgtccacacagaaacctgcaaaggaatgtttacagcagctttattcataactgcccccaaactggatgcaacagattgtcccttgataggcgaatggataaccaaactattgtgatacattcatacaatggaatgttattaagcgatcaaaagaaaggagatattaaaccaggaaaagacatggagaaaatatagatgcatattattaagtaattgaaaaacctatatactgtaacaattccaattatataacattctggaggaggaaaattatggtggcagtaaaaagatcagtggttgtcgggttgtggacagtagtgagggagggatgaataggtgaagcagagtggtattttaggtggtgaaactattctgtacgcactgtaatggtgggtacatgacattatgcatttgttaaagtctgtagaactttacagcacaaaaagttaacctcagtgtgtacaaatttaacaatagctttcacaggtaggcatggtggcttctgcctgtaatcccagctacttgggaggctgaggtaagaagatcactggaggccaagagttcaagtccagcttgggacttgagttcaagtccagcaacatggcaagaccttgtctctaaaaaaaaaaatttttttaaggaaaaaataatataattcaggaggccacgggatttgggaaagaaagcagactgtgacaagagcatctaactgtattacaaatatatgaaacaacctcaccgaagggatggggagaaaagtgctaccctaactttgaaaatgactggagtctgtaaaactaaaggccaaaggaactgtacaagagtacttactcaagttgataaagtttttctgcatgggtttataggttaataaatgcattgttgctatacttgtatactaacattgaacaataagaaaatagatagcagatagtgggagccaggtttctcactgttggagtggaaattttatgtacactaacattgaccaagaagaaaatagatagcagatagtgggagccaggtttttcactgttggagtgaaaattttacaaatcaacaagggaggaagctagaatgacccatgtggtaatggattaacgttgaggatactagaacagctcatatatagttagatagttgcttgtggaaatttttatagatgggtatgtgcacaagttagtatacatactataaagtttagaagtttacaacaccaccaccacttctgactccaattgtaagtttaggggtccccaagatcaccctcatgttgaataattccctagaggtactcacagaactcactgaaagctgctatatttacagttatggtttattacaataaaaggatacatattaaaaccagccaagggaagaagcacatgggacagagtacaggagaattcctcatgtgaagcttccagtttcttctcctgctggactaatggacagtggtaacttcccccagcaacaatctgtgacgacacgctagaagtattgccaaccaggtaagatcactcaagccttggtgtccagagtttttgttggggcttggtcatatagacatgattgactactcacatggctgttttttgttacagataccacatggctcaaaacctccaccattaattacattgttagcataggctatctggcatggcctaaagctcccaggttaacaaggacctacttttcagtcaggcattacagaggcttagagaatacctccctggagccaagggcaaaagccagaccaattcagtagtaacaagtatacctaatgctcagatcttggtttctaatattattcttcagtaagagtaaccaggactccttggagaaatggctgattccagggatagggtagaaaatgtacagaaccagcctggggcatcttgtagaggcagaaagtaagaaagtgctaaagaaaaaaaaaagatcactgtgagaggtatgtaaaagaagccaaatgaaagagcacccaatgggaaaatttagaaatatttgagcaaaataaatgaatgaataccatactattgtattataacctaaagtataacataaatattcatgattgtggtgggttgcagctgatctgggccagcgtcatcagtggtaaaataatttgctgaaacagctgtgagttaataattgtaataataagtaagtgtattagagagaaagtatgttgcaaggaagcattgggcagcacagcagagaaaaagctgtctgcaaaggggcagggctggagggaagttttataggctggacctggagggactacatgtagaacaaggtattcgggaacaggatattgtgcaaacgggatgtttgtagttagctgtttctcagaacaattgttctcactcaccctggggcaccccccttgttgttgctaacttatcaggactccacaatgagttcatactgatatataaataattggataaattaataaatggaagtgaatagacaaatctttccatatggaataatgctaattatattatctagatacttcatcctgaggatgggaggttaattctccactccttaagtgtgggctgtgcatagtgacttccttccagagtcccttatgaaaagtggagagtgggaggaaaggaataacttcatgggagagacgtgacaaacacaccttcaagccaagtgattatggtcaatataaacagtcataaatcatgttgatatcatatataccctcaatatgctatgatgaaaaatggcactttatctctgtgatctttgtcacaaaagtctgtaacaccaatctaaccatgagaaaaacaaatactttttttttttttttttgaggcggagtcttgctctgtctcccagactggagtgcagtgcagtggtgcaatcttgactcactgcagcctccacctcccaggttcaagcaattctcctgcctcagcctcccgagtagctgggattacaggtgcacaccaccgtgaccagctaatttttgtgggtttttttgtttgtttttcatttcgagacagagtcttactctgttgcccaggctggagtgcagtggcatgacctcggctcactgcaacctctgcctcttgggttcaagcgattctcctgcctcagcctcctgagtagctaggactacaggtgtgcaccaccacgcctggctaatttttgtattttttagtaaagatgggatttcaccatattgcccaggctggtcttgaactcctgacctcgtgatccgccctccttggcctcccaaagtgctgagattataggcatgagctgctgtgcctggccaatttttgtatttttaatagaaacggggtttccctgtgttgggtaggctggtctcaaactcctgaccttaagtgatccacccaccttggcctcccaaagtactgggactacaggcatgggagccacagtgcccagcctgagaaaaacaaattctaatagagggccatcctgtagtatacctgaccagaactctttaaactgtcaagatcctcaaaaagagaaagtctgagaaacaatcacagctaagagacacctaaggagacgcgacaagtaaacgtaatatagtggcatcctgaatgggatcctggaacagaaaaaggacattaagtaaaaactaaggaaatcaaactatggaccagttaataataacttttcagtattcattcattaactgtaataagtgagccatactaacataagctgttaataataggggaaaatggaaaatgtgtgtgtatgttggggggtatatgaaaatgctacactatctactcaatttgtaaatcaaaaactgttggctgggcgcagtggctcatgcctgtaatcccagcacttcgggaggccaaggcgggtggatcacttgaggtcaagagtttgagaacagcctgatcaacatggtgaaaccttgtctctactaaaaatacaaaattagccaggtgtggtggtgcacacctgtaatcccagcactttgggaggccaaggcgggtggatcacttgaggtcaagagtttgagaacagcctgatcaacatggtgaaaccttgtctctactaaaaatacaaaattagccaggtgtggtggtgcacacctgtaatcccagctactcgggaggatgaggcagaagaatctcttgaacctgggaggtggaggttgcagtgagccaagatcgtgccattgcactccagcctgggcaacaagagcaacatctctgtctcaaaaaaaaaagtttagaatgttttgattttaaaaagaattataattttaaaaagtgtagaacaggccgggcgctgggtggctcatgcctgtaatcctagcactttgggataccgaggcaggcagatcacgaggtcaggagatctagaccatcctggctacatggcgaaaccttgtctctactaaaaatacaaaaaaaattagtcgggcatggtggcggcgcctgtagtcccaggctggagaatggagtgaacctgggaggcagagaacctgggaggcgtgaacctgggaggcaggagaatggcatgaacctgagaggcggagttttcagtgagccgtgattgcaccacggcactccagcctgggcgacagagtgagactccctctcaaaaaaaaaaaaaaatgaattaaataaaaattaaaataaaaaactagctgggcgtggtggtgcacatctgtagtcccagctatacttggaaggctgaggcaggagaattgcttgaacccgggaggtagaggttgcagtgagcggagatcgcgccacttagcctgggtgacagagcaagatcctgtctaaaaaaaataaaaataaaactgtagaacaaggccgggcacagtggctcacacctgtaatcctagcactttgggaggccgaggcaagcggattgcttgcgcccaggaatttgagacaagcctgggcaacatggtgaaaccctgtgtctaaaatatatatgtatgcaaaaattagctgggcatggtggtgtgtgcccagagtcacaactgctcaggaggctgagatgggaggatcaactgagccctggaggttgagggtgcactgagccatgaccatgccaatgcactccagcctgggcacagagctagaccctgtctcaaaacaaaacaaaacaaaacattgtgaaacaatgaagattgtaggggaaatggcatatgaaaaagtgatttattataaatgggatcccctaagcatacaatgtaaacaaatatctgaccttcaaaggagggtgcagagtatgctttgcaagtctttaggcagagcattatagttttgtcacatacctttctatacgtcatatggagttaaatacagagatacattattttgggaattaaattcttaagaattatagtactattttttgagaaatgtatttcaactgtcattttactgaaggactgtaggtcctgggatattagagaatttcacttattacaaagattaaaagcaaacatgattaatatttacaaatatattgaattattatctgaatttattgtgaagattttctaatatgatgagttgattttaaaagttaccaatgtttctggtataaaaaaaattataactaattgtaatttatatttcaaatgggtatgaaagtgaataataagggtaacaataaaaggaagaaaataaaattataataaaaatgagaacataatgcttacagattaaaaagtgatataaagggataacttttcagaagagattaaaaactatctagaataatataatatacattgtatgactgctggattttatgagtacatcctccagcctcttattgagtttgtaaagaaatagtgactgtttccctcattaatggcaagtgtaaatagccgaggtgggcattcaaagacagtttaccatctccccacatggggcttttgaaggttgtcactaaactaattatttccatgaaaatgtgttaatggaatttatttcactgttgagtcttctacttagagtcttttatagaggcaacatattttataaaactgcatggaaaaagatatcagcaatcaatctttagagtagtagacttttgcaaaaacatgatttctcttgtatttgtaccctaataagaaatctagcagtcttctagcaaagaacatcacaacatcttacagaaaatttggtttgaactaagagactaaagagacatagagaccaaatttttaaagttaaaatatttctatcaataaccttttattcaagcattattgagtgttgttttcattagataatggcactggcttctcatatatattgcatatagtattgcagtctgggaatggcatagtcactttcctccattatggtaagctttgcctgtgtctgaatgcccagccttaacagtgttgctaatcacttatgcgaaatgtgtgaccaagtctacatttgctggaaatttctgacattgtaaatatttgggtatattgttgtaatcatcattaattagtattttcaggaaggaaccaggggtaacatatagcaacctagcaagtggatttacttttacagattcattcctctacagttctgttcatgggtcatggttggttttttttttttttcagtttcttttattgtggtaaaatacacataacgaaatgttctgtcttacccatttttaagtatacaatttattggtattaagtatattaatattattgtacaactatcaccaccatccatctccagaactcttttcattttgcaaaattgaaactttctatccattaaacagtaacttctcattccttcctcctcttagcccctggcaaccatcattctgctttttgactatgatttggactacaatgaataactaatttaagtggaatcatacagtatttatctttttgtgaccaatttatttcagttaacatgatgtcctcatcaaggttcactcatattgcagcatatattagaatttatttatttttgtttgtttgtttttgagacagagtctcgctctgtcgctaggctggagtgcagtggcgcgatcttggctcactgcaacctcctcctcccacgttcaagagattctgctgcctcagcctcccaagtagctgggactacaggcgtgcgccatcacacccagctaatttttgtatttttagtagagatggagtgtcaccatgttggccagcctggtctcgaactcctgacctcaggtgatctgccgaactcggcctcccaaaatgttggtattatacgcatgagccaccgtgcccagccaaaatttatttcctttttaaggctgaataatattctgttgtatatatgtaccacattttgcttatccattcatcagtcagttgatacctgggttgcttccatgttttagctactgtgaataatgctgctatgattacaaatgttatgattataaatgtataagtatctctttgggacccaattcttttgagtatatacccatagaattgctgggtcatttggtaattctattttaaactctttgaggaaaccgttttccacagtggttgtactattttacattttctttcttttttattattattatactttaaattctagggtacatgtgcacaacatgcaggtttgttacatatgtatatgtgtgccatgttggtgtgctgcacccattaactcgtcatttagcattaggtatatctcctaatgctatccctccccgtttcccccatcctatgacagactctggtgtatgatggtccccaccctgtgttcaagtattctcattgttcaattcccatgtatgagtgagaacatgtggtgtttggttttctgtccttgcaatagtttgctcagaatgatggtttccagcttcatccatgtctctacaaaggacatgaatgcatccttttttatggctgcatagtattccatggtgtatatgtgccacgttttcttaatccagtctaccattgatgggcatttgggttggttccaagtctttgctattgtgaatagtgccacaataaacatacgtgtgcatgtgtctttatagcagcatgatttataatcctttgggtatatgcccagtaatggaattgctgggtcagatggtatttctagttctagatccttgaggaatcatcacaatgtcttccacaatggttgaactagtttacctcccaccaacagtgtaaaagtgttcctatttctccacatcctctccagcacctgttgtttcctgactttttaatgattgccattctaactggtgtgagatggtatctcattgtggttttgatttgcatttctctgatgaccagtgatgttgagcattttttcatgtgtcttttggctgcataaatgtctttttttgagaagtgtctgttcatatcctttgcccactttttgatggggttgtttgattttttcttgtaaatttatttaagttctttgtagattctggatattagccctttgtcaggtgggtagattgtaaaaattttctcccattctgtaggttgcctgttcactcagatggtagtttcttttgctgtgcagaagctctttagtttaattagatcccatttttcaattttggcttttgttgccattgcttttggtgttttagtcatgaagtccttgcccatgcctatggcctgaatggtattgcctagattttcttctaggctttttatgattttaggtctaacatttaagtctttaatccatcttgaattcatttttgtataaggtgtaaggaagggatccagtttcagctttctacatatggctagccagttttcccagcaccatttattaaatagggaatcctttccccatttcttgtttttgtcagatttgtcagtgatcagatggttatagatgtgtggtattatttctgagggctctattctgttccattggtctgtatctctgttttggtaccagtaccatgctgttttggttactgtagccttgtagtatagtttgaagtcaggtagcatgatgcctccagctttgttcttttggcttaggattgtcttggcaatgcaggctcttttttgattccatatgaacttgaaagtagttttttccaatactgtgaagaaagtcattggtagtttaatggggatggcattgaatctataaattaccttgggctatatggccattttcacaatattgattcttcctgtccatgagcatggaatgttcttccatttgtttgtgtcctctcttatttcattgagcagtggtttgtagttctccttgaagaggtccttcacatcccttgtaattggatttccaggttttttattctctttgaagcaatcgtgaatgggagttcactcatgatttggctctctgtttgtctgttattggtgtataggaatgcttgttgtgatttttgcacattgattttgtatcctgagactttgctgaagttgcatatcagcttaaggagatttggggctgagacggtggggttttctaaatatacaatcatgtcatctgcaaacagggacaatttgacttcctcttttcctaattgaatacgctttatttccttctcctgcctgattaccctggccagaacttctaacactatgttgaataggagtggtgagagagggcatccctgtcttgtgccggctttcaaagggaattcctccagtttttgcccattagtatgatattggctgtgggtttgtcataaatagctcttattatttttagatacatcccatcaatacctagtttattgagagtttttagcatgaagggctgttgaattttgttgaaggctttttctgcatctattgagataatcatgtggtttttgtctttggttctgtttatgtgatggattatgtttattgatttgctcatgttgaaccagccttgcatcccatggacaaagccaacttaatcatggtggataagctttttgatgtgctgctggattcggtttgccagtattttattgaggatttttgcattgatgttcatcagggatattggtctaaaattctcttcttttgttgtgtctctgccaggctttgctatcaggacgatgttggcctcataaaatgaattagggaggattccctctttttctattgattggaatagtttcagaaggaatggtaccagctcctctttgtagctctggtagaattcagctgtgaatccatctggtcctggactttttttggttggtaggctattaattattgcctcaatttcagaacctgttattggtctattcagagattcaacttcttcctggtttagtcttgggagggtgtatgtgtccaggaatttatccatttcttctagattttctactttatttgtgtagaggtgtttatagtattctctgatggtagtttgtatttctgtgggattggtggtgatatcccctttattattttttattgcatctatttgattcttctctcttttcttcattagtcttgctagcagtctatcaattttgttgatcttttcaaaaaaccagctcctggattcatcgatttttttgaagggtgttttgtgtctctatctccttcaattctgctctgatcttagttatttcttgccttctgctagcttttgaatgtgtttgctcttgcttctctagttcttttaattgtgatgttagggtgtcaattttagatctttcctgctttctcttgtgggcatttagtgctataaatttccctctatacactgctttaaatgtgtcccagagattctggtatgttgtgtgtttgttctcattggtttcaaagaacacctttatttctgccttcatttcattatgtacccagtagtcattcaggatcaggttgttcagtttccatgtagttgagcggttttcagtgagtttcttaatcctgagttctagtttgattgcattgtggtctgagagacagtttgttataatttctcttcttttacatttgctgaggagtgctttacttccaactatgtggtcaattttggaataagtgtgatgtggtgctgagaacaatgtatattctgttgatttggggtggagagttctgcagatgtctattaggtctgcagatgtctattaggtgcagagctgagttcaattcctggatatccttgttaatttcctgtcttgttgatctgtctaatgttgacagtggggtgttaaagtctctcattattgtgtgggagtctaagtctctttgtaggtctctaagaacttgctttatgaatctgggtgcttctgtattgggtgcatatatatttaggatagttagctcttcttgttgaattgatccctttaccattatgtaatggccttctttgtctcttttgatctttgttggtttaaagtctgttatatcagagactaggattgcaacccctgcttttttttttccatttgcttggtagatcttcctccatccctttattttgagcctatgtgtgtctctgcatgtgagatgggtctcctgaatacagcacactgatgggtcttgactctttatccaatttggcagtctgtgtcttttaattggagcatttagcccatttacatttaaggttaatattgttatgtgtgaatttgatcctgtcattatgatattagctggttattttgctggttagttgatgcagtttcttcctcgcatcgatggtctttacaatttggcatgtttttgcagtggctggtactggttgttcccttccaagtttagtgcttccttcaggagctcttgtaaggcaggcctggtggtgacaaaatctctcagcatttgtttgtctgtaaaggattttatttctccttcacttatgaagcttagtttggctggatatgaaattctgggttgaaaattcttttctgtaagaatgttgaatattggcccccactctcttctggcttgtagagtttctgccaagagatccgctattagtctgatgggcttccctttgtgagtaacccaacctttctctctggctgcccttaacattttttccttcatttcaactttggtgaatctgacaattatgtgtcttggagttgctcttctcaaggagtatctttgtgatgttctctgtatttcctgaatttgaatgttggcctgccttgctacgttggggaagttctcctggataatatcctgaagagtgttttccaacttggttccattctccccgtcactttcaggtacaccagtcagacagagatttggtcttttcacgtagtcccatatttcttggaggctttgttcatttctttttacttttttctctaaacttctcttctggcttcatttcattcatttgatcttcagtcactgataccctttcttccacttgatcaaatcggctaccgaagcttgtgcatgcatcacgtagttctcgtgccatggttttcagctccatcaggtcatttaagggcttctctacaatgtttattctagttagccgttcatctaatcttttttcaaggtttttagcttcctggagatgggttcgaacaccctcctgtagctcggagaagtttgttattaccgatcgtctgaagccttctctcaactcatcaaagtcattctccgtccagctttgttctgttgctgacgaggagctgtgttcctttggaggagaagaggcactctgatttttagaattttcagcttttctgctctggtttgtccccatctttgtggttttttctacctttggtctttgatgatggtgatgtacagatggggttttggtgtagatgtcctttgtgtttgttagttttccttctaacagtcaggaccctcagctgcaggtctgttggagtttgctggaggtccactccagacactgtttgcctgggtatcaccagcagatgctgcagaacagcaaatattgcagaatggcagatattgctgcctgatccttcctctggaagtttcgtctcagaggggcacctggctgtatgagatgtcagttggcccctactgggagatgtctcccagttaggctactcctgggtcagggacccacttgaggaggcaatatgtcctttctcagatctcaaattccatgctgggagaaccactactctcttcaaagctgtcagacagggatgtttaagtctccgaagtttctgctgccttttgttcagctatgccctgctcccagaggtggagtctacagaggcaggcaggcctccttcggctgcggtgggctccacccagttcaagcttcccagccactttgtttacctactcaagcctcagcaatggtggttgccccttcctcagcctagctgctgccttgcagttcgatctcagactgctgtgccagcagtgaacgagactctgtgggtgtgggaccctccaagccaggcatgggatataatctcctggtgtgctgtttgctaaggccattggaaaagtgcagtattagggtgggagtgacctgattttccaggtaccatctgtcacggcttccctttgctaggaaagggaattcctcgaccccttgcgcttcccgggtgaagcactgccccaccctgctccgtgggctgcacccactgtctgacaagccccagtgagatgaacccagtacctcagttggaaatgcagaaatcacccgtcttctgtgttgctcatgctgggagctgcagactggagctgttcttatttggccatcttggaacccttattttacattttcaacagtgcacagggttctgatttctccacatccttatcaatgattgttgttttctgtttttctgatagtagccatcctaattagtatgtacctcattataattttgatttgtgttttcctaatgattagtgatactgaacttttttttttaaatgtgctttatgaccatttatgtatcttctttttttgtttttttttgtttttttttttgagatggagtctcactctgtcaccaggctggagtgcagtggcgtgatctcggctcactgcaacttccacctcctgggttcaagtgattctcctggctcggcctcccgagtagctgggactacaggtgcacaccaccacatccagctaatttttatatttttattagagacggggtttcaccgtgttggccaggatggtctcgatctcttgacctcgtgattcgcctaccttggccttccaaagtgctgggattacaggtgtgagccaccacgcctggtctaccatttgtatatcttctttggagaaatgtctattcaagtcatttgcccactttttaattgggtggtttggtttttatattgttgagttctgtattaactccttgtcagatatatgatttgcaaatatgttctctcattctgtgggttgtctttctactctgttgatagtgtcttttgatgcacaacatttttaaattttcataaagtccagtttgtctattttgttgttgttgcctgtatctttgatgtcatatctaagaaagcattgctacatctaaggttgtgctttcttctttcttgccttatgttttttaaaataataattttatagtattaggtcttatatttaggtcatggagccatttggggttaattttagtatatagtatgaggtaaggtccaatttcattcttttgcttgtggatatccagtttttccagatccatttgttgaaaaggctgtatttttctccactggatggtcttgacacccttgtcaaaaatcactttaccatatatgcaaggatgcatttctggactccctattgtatttagttgttctacatatgtgtctgtctttatgtcagtactattctgccttgattactgtagctttgtagtaacttttgaaatcagaaagtgtggctgggcttggtggctcatgcctgtaatcccagcactgtgggaggctgggatgggtggatcacctgaggtcagaggtttaagaccagcctggccaacatggtgaaatgccatctctactgaaaatacaaaaattagttgggtatgatggcacacgtctgtaatcccagctattcctcaggagactgaggcatgagaatcgcttgaacccgggagacagaggttgcagtgagccgaaattgcaccactgcactccagcctggacgacagagtgagactctgtcccaaaaaaagaaaagaaagtgtgaagtgtgaatcctccagcattgtttttccttttcaggattattttggctatttggagtcccttgaaattccatataaatattaggatgagtttgtctttttctacaaaaaccgttatttggatattgatagagattgcattaaatcagaggatcactgaataatattgacatctgaacaatattaaccccttcagttcatgaacatggaatgtctttttttaatgtcctctttaatttctttcaaaaatatttagtggttttcattgtattgcttctttggttcatacctaagtattttattctttttggtgctactataaatagaattgttttcttaatttccttgtcagattgttcacatttagtgaatagatgcaactgatttttgtgtgttgactttgtatcctgccattttgatgaatttattagttctaataggtgtgtgtgtatgtgtgtgtttgtaatctttagggttttctacatataggatcacgttatctgtaaagagataattttactttttccttgccaatttggatggcttttacttctttttcttgcctaatttctctgactagtacttctagcactctgtagaatagaagtagacaagcaggcaaccttgccttgttcctgatcttagaggaaaagcttttcgtcttttcatcattgaatatagtgctttttgtgggtttttcatatatgacttttattacagtgaggtagtttccttctattcttagtttttttagtgtttttatcattaaagtttttttgaattttgtcaaacatcaattgagatgatcatgtgggttttttccttcattttgttaatgtggtatattacattgtttgatttttcatgtgttgaggcatccttacagttccggaataaatcccattcagtcatggtgtataattattttaatatgctgctgaattctgtttctagtattttgtctcatggtcatgattttcaaccaagtgagataaattatttaaaatgataaaacttgaggtcacagggcaaactgctgctcccaaaattggagatactgacaggtgaaaatagagaatcacagcttagtagagcagaaacccacaagtagcaacctctgcaggtaccagtatcagagtagggaaatctgaattgtaattgatgtattcctggaaactcaagtgtggacaactctgagagttaacccagtcatatgggtgccccgacacttttgtgagttttacctccaagagctctatcaaattctcacagtgaatatgcgagaaaaatccccctgtgcttctggaagggaaaggggaaaaggaaccatgtggaactacaccagaacactttgctcttcttaacaaggtctcccctaaggagaaattagttaactaaataggatctaacctgctagggttttgttagagcctaactgacctgggataagctgcatacccacctccagcccactctatacatccttccccaactaaggggtaaggagtggggtagactgagaagcaacatgaagttcacagtgtggaggtacaggctcactgaaagatagaaacctaatcataggactgtagaatgcttccccttcctccacatcttactaccacgttactaaaggcctagttatagcaattccttttacccagtacatcgtgcctggctattaagaaaaattacaagacatgctaaaaggcaaaaacacagtttgaagagatagaggaagtatcataactagatatggcagggatgttggaattatcagaccagaaattttgcagcgagttttaggacctacttataagttaggaccttaaagataaattttttaaatatatagggaaatttcaattatagatgaattttagttcataatagtaacaaaccatcctacgtttctcagcttgtgaagcaaattatctgcagtactactgagtcctttagagttaatctttttggttaccaattcttgcttgatggacattagtaccagcccagtgaatcttcccctgtggtgcggtataaattattttagacaatacagactagatgtttattgctatacagatttatcaaagaaatatgtagaagatacatagggaaaattgttatgaatagcatactgaataaacaaatagccaaaataagtttacttaatatggtcatggaaattgatctttggtatttccagtgaaatcaaacttttgaagtatatcttatctgtgaaacttgtatgtattcagctattgcattatctaaaagcttattccatttaagtggtaattgtgaaattttttttgttttgctaataattctctggaaaatattaatcttgagttctgtattctaatgtttagtaatatgtgttcattttattttattttattttttgagatggagttttgctattgttgccgaggctgtaatgcaatggcgcgatctctgctcactgcagcccccacctcccggattcaagcgatctcctgcctcagcctccctagtagctgggattacaggcctgcgccaccatgcctggctaattttgtatttttagtagagacaggatttctccatgttggtcaggctggtcatgatatatgttcattttatgatgtcttccaacaattaagagaaaatgcactacctgaatggtaattgttatgggctgaattgtctccaccaaattcatatgttgaggttttaacccccagcacctcagaatgatatagggcccttaaggaggtaattaatgttaaatgaagtccttaaagtgagtcttaatccattaggattggtctcattataagaagaaaagattagggcacaaatagagaaaaagaccatgtgaagacagagggaaaagatatccatttataagccaaacagagaggcttcaataaatcaaccctgatgacatctagatctggaatttctcatctccagaactgtgagaaaattttctgttgtttaagtcacccagtctgtggtactttgttattgcagccctagcaaactaatacagtcatgatagtaattttccccctagggaaattttcttctctatatggaagtttttttaagattaaaaatttggaaataattttaaatttacagaaaagttgcaacaatagtccagagaacacccttatactctttactcagtttaacctattttttgccccatttgctttatacttcgtctctctacttattcatgtatatttgaaccatttgaaaataagttaaatacactatgccctgttatccctaaatacttcactacacacttcctaaaaatagggacatgcttttacataaccacagtacatttattaatttcagaaaatgtaacattgataaagtactttaatctgttgtccacattgaatggaagatttttttttttactttgaatcactgaggttgtttttgttttattttggttttgctacaataacagtggtttttgtttgtttctttgttttaatttgttttcctggggcataatggctcagtggcagtactatgtcggtagcagttttaatcagactgagtttaaattctacctctacttgcttagttgactgatcttgggaaaaattatttaacctctctgtgcttcagtttctctatctgtaaggttaatagggttactgagagaattaaatgaaaaaatatgtaacagcttttagtaaagtacatgccatatagtaaggatttttattatctatccaaatcattttttaagcagtaatttttcctataggcttaacaaagaaatgttgcttctttcttttgcggtcagaaaacaatacctaaagttctactttgaagctctctggtaaaacttcctggaacagcacacaacagacgattttaaaaagataaataaattagagatgatgtcagcagatcattcaattctctagccacctatggtttaaaaaaattaattcataaaacttccattattttaataatttcaggaagctactctatcgtagcagataatataggtaaaattccgtccaatgtgtttactgtaaactgctactccctacatattatgctttgttcatctaacaaatattttgaaagttttttcattcttttctcaggcatataaacaatgtcacccaaagaattaagaatgttttggagttttttcacttccataaaaaacgtcattgttaccaaattcaacagatgtgattgagaatataatgctcttgattcctccttaaccttccttataaagccaatgtttttagagtattttgcagaatcctaatttttttgtactttttattttagtttagctttttaatcaacacataattgtccatatttatggggtacatagtgatgttttgatacatataatgtatagtgatcttatcagggtaattagtgtatcatttcaaatgtttatcatttctttgtgttggaaacattcagtatcctccttctagttatttgaaactatatgttattgttaactatagtcatcctgcagtgatacagaacagtagaacttactccttctatatagctgtaatttagtatcctttaacaaatctctctctatccctttctttctcctacccttctcagcctctaatattttctgttccactttttacttccatgagatcaatttttttttttttagcctccaaatatgagtgagtatatgcggtgtttaactttctgttcctggcttacttcatataacataatgtcttccatttccacccatgttgccaagaatgacaggattttattctttttcaggctgaatagtatctcattgtgtacatataccacattttctttatctattatctattgttggacacaacaacatatgttggttattatgtatttccatatgttggctattgtgaatagtgctggaatgaacatgggggtacagatatctctgacatactgatttcctttcctttggataaatgcccaatagtgtgattgctggatcatatggtagttctatttgtagctttttgaggaacctccatattgttctccagattggctgaaaagccattacatttttaatttgcattagttatgtcattgtcaaccttaaataatgcgattcagaaagtgtgattaagtatagcgtttattcaagtgcgaaacttgaggatagccacatgggaaacacagacttcaaagaaatcgggttagtgttccaaagtgggaaagttgaggtttcacttatataggcagttaacagggttgcaacatgtttcatacagggtcagtacctatgttatggcaatttgattggttacagtttgctacgtttcaaggaagatcagttctacattctgtgagaaggggtgatgatctgaggggatcttctctctggtgccacaagacctttcctgatcatttacaggaaaaaacagaagatgcagctgcatgctacatgactcaggccacatagccaccgtcctttcaaggctcaaaataatttaaagttacaacagctttaagtttaaattatttgcattttcccctttttatcaagatcgtttgaagaaaccatcataggtgaactcaaatggttttggcttcttttattttcaggagctcagtcttccattgctaggaaggcttattactagagagtcatgtcccatggcaaggagaatttgtcagactgtaaagcaaatagagtataggccacatttagaggaaggaggtgactttgtgactcaagtcaggctacatagctgcatcttcagttaaagtatttcattgagcaaccattattttagtcttttcagttgtgtgttgactccattacaaacaaatgccaaagtagcagtaagacaaaaacaggacaaaacacaacaaataattcctagaataagtaacagcttccaccaccatgtttcccaagatctaaaccagctgcctggccaattgttcagagaggtgttggatctcaaaggttggttatttgggttttcatatcagccgttaatttagtgatgttacctgattcatctgggatatagacataagactcaatttttatgatagctcaggtttccccttgggctgcagtatgtctaaagccatatggttctgcaatacagcttttctcataggaccaacttcattgttcaataatgagattcttatgtggctgtcatttagggccttttggtgtgtgtaattggttagggtctctacatgccaaatgacatcctcaatacccagttgtggcagaaagatggaaactaaatgatcttaacagtggaattcagaacaaacccaaagagattgtaaataggaagatttgcaggctttgaaagggtatgaagtattagaccttgtgcccaggcataactcaaagaatactgtcctaaccatcctgggagtaaccatggccatggattggtgtcacacagccaatatagtccatttggagctagccagtaaatacacaatgcccattcagtggcatgccagtcagttttttgtaatataatggtgtgcatacagtattccttagttttccatcccttatttctaatggcaaaggtggtttcattattgggccatgtatcttcagtttgctccttttgttctcagcatagaggagaaagctgatgaagctgaccaaaagagggggttatgccagataaaacagtcccaaatttgtgttataccatccccaattcaagttgtctcatttttcagttgacaacttgatttcagttggggcagt[136 bp omitted]accctgtctctactaaaaatacaaaaattagccgggcatggtgcacatgtaatcccagctactcccagctgaggcaggggaattgcttgaaccagggaggtggaggttgcagtgagccaagatcacgccactgcactccagcctgggcgacagagtgagactccgtcttaaaaaaaaagaaaaaaaaagctaacatactggtttcatctactgaaaaatctcttcccatgccccttgctttataaagtgttatcaataggccagtattatatgttatccttagtcatactaagtgttaaacaccaatgattgtttttgagaagcacggatatatttctggtcttctattcagtcttgtccttggaaaggcaatacccaccatggtgggtcagatccactggaaaggggcatgaggctacatatccaacagatgttttcctgtaatttatcagcattgtcttgagcccattgcaagaagatgtttgcttcatagacaagagctggtgatagcaacaacaaaacataagaacaagggatgaaaataaatttagtgggaacttgcaaaggatgaccttctccatctattataattattaatattaagagttcatttagatacaggcctggttcagtgtcttgggaaagctgactacctcagatgctgtctttttcttcttcttgttggctctggagaatttcaattttagatcactggcttgagatgaagtccagattggcaaagtgactttctttaaatgggtgacggatatccaagaattgattccttttagtttagcagcacaagagtcagttagatgcacttgataaggttatttcaccttcgttggagggagtcctttaaaagatgctgtttctggctgggcacggtggctcacgctggtaatcccagcacttggggaggctgaggtgggtggatcacttaagcccaggagtttgagaccagcctgggcaacatggcgaaacctcatctctatgaaaaatacaaaaaattagccaggaatggtggcgtgtgcctgtagtcccagctacttttagggggctgaggcaggagaatcacttgaactcaggaggttgaggctgtagtgagcctagattgcaccactgcactccagcctggatgacaaagtgagatactttaaaaaaaaaatacataaataaataaaagctgctgtttccaatagacaaagactcctggttgaagtccttggtccttgggttctttgtcttctaggagcttacagtggaaacactcttttactcaattacagtttttaattagctgccttacaaggccattacaataatacaacatatatccttttaatacaatagattcacagtttcctggagacagtttcataggtctgcctgtttcaaacagagacagccagtatttatcaaaaaggattgatcttaggctaagcaaaaccagtggaagggcttttggcaaaggaattttaagagcctcagttaattttgccaatttagttttgattattctgtttgtgtgttccactaacccagattactggggagcaatatgcataatggaaatgttggaaaataggttagattttatatattgactggattatttgtctggtaagatgagtacccctgttgctatgaagttctagaggaactccccaatttgaaataattttccctaagaattttacttactgctaatgctgttgctcttctggatagaaatgcttctatcctatgagaaaatgtataattcattactagaatatacttgtatccttgtgatggtggtagctgaataaaatataattgtcctaccttgaaggggctttcaggtagaggaaaatgaccttgattgctatgtaaaggtttccctggattatattttgggcagatgtgtcaatgattgtatatctatataccaatccacagttggggaaggcctccaataatactgttttccccaagtaatcattttattagggccccaatgagttaaatcatgtacataagttcagaaagttgactgtaatttggttggaagtatgggtcgatcatttggtccctaccatagcccagtcttggaggagtatgttttcccttttgtttcccaattttcttgttcttttttggagctttatgttgagctaattttatgtcaaaatcaaatgctttcttaaaagctaaaaaggggttgatttgcttattcaaatacacttagagcagccctttttactatattatctgctaaatgatgtactttgctttgtggaatgtctgactttgaatggcttcagatcttgataatggctaatgatttgggaaataatatggcttctaataattctgaagcatggtgtccatttttaatggactgatcagaagaggttaaaaatcctctttgttttctgggcatggtggctcacgcctgtaatcccaacactttgggaggccgaggcagtgaaacacaagagttcccttgacccctttgtgagactcatgaaggggtggcttgctttcttagcgtgcagctctgagcccttcatgggagtgggagcatgcaggtgagcagttgcaggagccagggcaaacaaatgctggaacgagccggccacttctctccagtgggagcaggtcctgtgcaggccccacagcaggatccaagtgtgttacaatgctcttttagctctgccatctggagggagtgccggctacccctagagccccagagggcatatcactagctcagtgggctttttgcctcattgtgaggggcagctgccctctgccagtgagggcaaagggccagtgtgacagcctttttgggttcctgcacccagtggtcctgaaatcttgtccaatgcccaagaggaatgaggtcacacagacttgaaggatggtgaatgcagagattttattgagcaatggaagtggctcttagtgtgctggggtgctggaaaggggatggagtgggaaagtggtcttcccctggagttcaggtgtcccaaccgaacacctctccgaccatccccagctgaactcctctctgactgtagtctctgatgttcagctacttcttctactctgaatgttcaggtgcttctctcttctgtgtgtccactgagtttggggtctggggttcttatgggcacaggatagggggtgtggtgggctaaaagagaacatttaggtggggaaatggggatgtgaagttctcatttagggctgcaggtccaggcttgagggtggaacctttgccagggaccccgcccttctatctagtatttccctgccttctgtccatatcaacaggaggatcacttgagcccaggagttcaagaccagtctgggcaacatagtgagaccctgtctcaaaaaaaaaaaattctctttgtttccataccactccaaagtcatgagctactctgacagcatatctgctgcctgtataaatattagcagttatttcttttgtccacgacaagttctaactaatgctattaactctgcttgttgagctgaggttgcttttggaagacgagaactttctgtttcctcagttaagatactgtagcataatctggtccggtgcggtggctcatgcctgtaatcccatcagtttgggaggctgaggtgggtggatcacctgaggtcaggagttcgagaccagcctggccaacatggtgaaacctgtctgtaataaaaatacaaaaattagccaggtgtggtggcttgcgcctgtaagtccagcttctcagaagcctgaggca[137 bp omitted]tcccagcactttgagaggcagaggtgggtggatcaggaggtcaggtgttcaagaccagcctgaccaacatggtgaaaccccatctgtactgaaaatacaaaaattagccgggtgtggtggcaggcgcctgtagtcccagctactagggaggctgaggcaggataattgcttgaactcgggaggcggaggttgcagtgggccaagactgtaccactgcactccagcctgagtgacagagcaaaactccatctcgaaaaacaacaacaaaaaagataatctagcatgatctgcaaaataaattccagattcatccttcaagtaagatccatctgtaaatcaaacaacatcagtgtttagtgaagggaatttcttgcaggtccatcct[142 bp omitted]acccagtctctactaaaaatacaaaaattagctgggcgtggtggcaggcgcctgtagtcccagctacttgggaagctgaggcaggagaattgcttgaaccagggaggcggaggttgcagtgagcaagatcgtgccactgcactccagcctggtgacagagtgagactctgtctccaaaacaaaaacaaaaacaaaaaagattatgcaatcctgggccagccatggtggctcatgcctgtaatcccagcacttggggaggcagaggtgaggcgggaagatcatttgagcccagagtttcagaccagcctgggcaacatggcgaaacccgtctctacaaaaattcaccaggtatgatggtgcacacttgtagttcgatttactcagaaggctgaggcaggaggattgcttaagcctggaaggttgaggctgcagtgagccatgattgcagccactgctctccagactgggtgacagaaggagaccctgtctcaaaaaacaaacaaacaaacaaaagtttctttgtcagttttcaaatagtttatctcccctttttagactatcagtctcttgattagctattctattgtggtaaatagttgttagctagacaacagcaaatctgcactttcaaaggcatgattgttaggtgaaaatttacatccctaggcacagaatttagatctaaacagcattatttgctgagacaaagaaggccataggtaaagggccaccagacaagacaagattgccaggtagttttaaacagaggtaagatttcttatgtaaactttaagccagtgtcttccccatcatatttcttgtggtttagatgcagagagggagattttctttataaatgcagatctctttcacaaagagtgtctaaatagccagctaaatgccagaaagttgtattttggagaccaatctagttagataggcagccttttcaagttagcttttttcttgattagattactaacttcagggtggagcccttggatgaataggtcaaagaaagcatgcagtttataggacatatatttaaatatgtgaaaattagacacagctggaaggcagaacacgtagattccctcaaatcaaggagctcatttttacattgaatcctaggtcttcaaaactagggaaatgccacaggattggacagtgcaatgcttctacagtgccccttgctgcaaggacgttcccccaagactggtgggtaacccaacattaatcagctactctgtgatcagcccatcctccatgggagtcttacgccttagcggcaactgtttccatagaccctaagggtcaaaaccactcttttcttatctatatgcaggaagaaatgagtagtctcctacagtaataaccactcattgtaaatgctgtcattgtaaatgctgtcaactacctccatagctgcagtcctcaccagagactttcagctattgcacactcaaaggtcatgttctctcatagtacaaaataatccctggtatccccaaaagccaaagagataagggagagagagcagatctttagacctgagaaaaaccttccataggttttgggactccacaaagaaagcaaaagatcccaaaaggtgggtgttcagtacctttttctatgttccttaaggggtctcaggaccactagaagtctcctctagatttcttcatttgatatcaaagatgacaaaaggaaggaggaacagaagtagaaggaaatggataaataaatcttagaggagccaaattggggggattttattttttcttttttgagatggagtctcattctgtcacccaggctggagtgcagtggtatgatctcggctcactgcaacctccatctcctgggctcaagcagttctcctgcctcagccccctgagtagctgggattacaggcatgtgccgccacacccagctaatgtttgtatttttagtagagaaggggtttcaccatgttggtcaggcggtctcgaactcctgacctcatgatctgcctgccttggcctcccaaagtgctgggattacaggcatgagccatcgcgccctgcctggattttaagcttttcaaaacgcaaaaatcatgttactcaaaattgttactaccagatgttgaagaatagctatattattaattgctattagattctgtacaaatttctaacctctaccattagattttcttatgggaaggattagagtgttacaggggcttgtacaaggaataatcaagcctctttttatagaatccaaaactacagctcttactccctccaaggccttcaatcttagagggtattgcttaaggtttgggacaggttttgatggatctatctggattttgactggaggagctaagataattttcctcatatcagtggagaattttgactacagctaattaggcactacttttaagagcgcttctagttctttattatttaacaattcagtatcctctatggcaatataaattgcaattaaaaggatcagatttggaaaaatttttgtatctcacaattttgttttaccttctaattctaaatacacttcccccttttgagaagagtatggctattatataatttaaaacatttctccttatcaaatgcatgggggctgagggaactaagaggaaaacatgtgttccctctagggaacctaactgaaaaactataggttgagattgatatgctgttataggagtatttgttacacccaccatctgtaatggtttttgactccaaggaataagactctgtaagaaggtgggatttattattgataatgcagctctggtgtcattaagagcttgtgtttggggccaggcgcagtggttcatgtctataatcccagcactttgggatgccaagatgggtcgactgcttgagttcaagagtttaagaccagcctgggcagcaaggcaaaaccctgtctctacaaaacatacaaaaatcagccagccatggtggtgcacacctgcagtcccagcaactcaggaggctcaggcttgagttagggaggcagaggttgcagtgagccaagattgcactactgcaattcagcctgggtgacagaatgagaccctgtctcaatacaaaacaaaaacaaaaacaacgtaggccctcgctaacaatatttttcaaaaaaaaattttttttaatttttaaagagcttggtttgttttccatttaaagttatttcagttactcctaaggtattagtgagaagagggaagttccctcttttgatttcctcagggcactcctattcttccttttctttggactgttttcattctttccattttaattttctacaatcctttttgaaatgtccaggctttttttttttttttgcagtcattgcaatgcaggagattgggtcagttttggagtttaaaaaggctttttaggggttttaattggttggacaattgttttaattgtaaactcataaccttatttggttttcttccctgtttaacttctctttccttttcttccttggttagggtatgggacctaggtcccatagggtatgggtacgttcagcaaaataaactagataatgagtttgaggataactaactggtgcattgtttctttattataattgctaattcttaatctaatccatttataaagtttaagttacaaggccaggcactatggctcacatctgtaatcccagcactttgggaggccaaggtgggcagatcacctgaggtcaagagtttaagaccagcctggccaacacagcaaaaccttgtctttactaaaaatacaaaaaaaattagccaggcatggtggcgtgtacctgtagtcccagctactcaggaggctgaagcatgagaatcacttgaacccgggaggcagagattgtggtgagccaagattgtgccattgcacaccagcctgggtgacagagtgggactccgtctcaacaacaaaagtttaagttataggaagtatcattttggtggttagtataactttattctgataggcctgaatattttttaatgttttttccccaaatctttcatagtgtgacatcaaaggcttgatatagtttggatatttgtcctgtccgaatttcatgttgaaatttgatccccagcgttggagggacctagtgggagatgtttggctcatgggggcagatcatttgtgagtggcttggtgccatcctcacagtaatgaatgagttctcattctattggttcccatgagagctgattgttaaaaagagcctggcacctcccctcaatttcttcctctcttgccatgtgatctctgcacaccagctccccttctccttctgccatgggtggaagcagctggaggccttcaccagaggcaaatgctggcaccatgcttcttcttgtacagtcttcagaattgtgaaccaaataaacctcttttcttataaattacccagtctcaggtattcctttatagcaacacaaagacagactaagacaaggctcatgaaaattttgttgatgttgtattttgttccaatcaaccactttttgaaaaactaaggggatagcatctagtaaagctttggcagtgttgcaggcccattcacaatctgcttcagaacatttatggaagttctctgaagaatttctctaatgtgcctttgctatcctatttggctttatcaaagatgaacgaattgatataagtcagagaatctgggattgaaagtttgaatgtttaattcaaattctctagcaaatccaatagaatcctgaagaggattaggaaattatttaattatgcctttaagttctacctttgagcatggttgataaatcaagcaggttctcttctactagacacacagggtattccctaaatggagccagtacagcatctggaggaggaggaggaggaagggaaggtagtctgatagacaaggaagttctgacaatgagggacaaagagaagaaggagctgaaggagaagaagaaatgtcagggtttttcaattcaaaattattttagacaattttttcatttcctctttcaaagaaatggctttatcagaaagcttctaagtaccattgaaaatagctctcccagttattttgttttattttagagccagcttttattttggattcagggggtacctgtgtatgtttgttatatgggtatattgtgtgatgctgaggtttgtgggtacaaaggatcccattacccaggtagtgagcatagtacccaatatgtagttttttagcccttgcccacccccaagtagttcccagtgttaattttccttctgttatgtccatgtgtaccgatgcttagctcccacttataagtgagaacatgcagtatttggttttctgttcctgtgttaattcacttaggataatgagagctggatttttaaaaattgagtatgcagagaaactagtttaggtatttcaaaggtacccccattttggccactgtaatttggggtcattgcaaattatgcatgactaattttctaaatatttacatgaagatgtgccgtaagtattaaacatgaatccagcttacgtttctagtggtggatctcttcttcaggaggaatacttggttttagatgcatgattacccagactttagattttcctcttgaatgaccaaacaacttagataggagatattttggattaagtgtgccgcctgtgggaatagcccctcaaggtgtcacccttgtgttggtttttcccttttatgtgtcttggtgatcccaagaggcttgggtgcttaaggcagtaggtgatcagctgttatgtgtgttcatttaactttatggtttttgtttgtttgttttgctctgtcacccaggctagagtgcagtggtgtgattacagctcactgcagcctcgaattcctggtctcaagtgatcctcccttatttcagcctcccaagtagctgggactacaggtgcacaccaccacatctggctaatttcttatatattttttgtagagatggagtctcactgtgttgcccaggttagtcctaaactcctgggttcaagtgatccttctgccttggcctcccaaagtgctgggattataggcattgagcctccgtgcctggctctgtatgctcttcttaagggttttcctgtaagactgtttcatgtcatgaacaatgagctccaacactcccacaaagacctcggtagcctaaggtgcctttcagttggcaagaacagtgtctctcatctttgggacttattttgtcctcataaagagccttttgtagttttaattactcaagaagaaactttaggccaggcacagtggctcacacctgtaatctcagcactttgggaggctgagatgggtggattgcttgagcctaggagtttgagatcagactggacaatatggcaaaactccgtctctacaaacaatacaaaaaattagccaggtgtggggacgcacacctgtagttccacctatttgggagactgaggtgagtgaatcatttggacctcggaagttgaggcttcagtgagccatgatcatcgatactgcactccagcctgggcaacaaagggagaccctgtctcaaaaaaaaaaaaaaagaagaagaagaagaatatttatatttgtcagttgtcagttgaactgagcttcagaatctggttagttttaaagattacaaattttgcttaagtcacaaagattcatttcctcttttcaaagataaactgttttctccctgacca[137 bp omitted]cacagtgaaaccctgtctctactaaaaatacaaaattagctgggcatggtggcacgcacctgtaatcccagctactccagaggctgagacaggagaattgcttgaacccaggaggcggaggttgcagtgagccgagattgcaccactgcactccagcctgggccataaagtgagaggctgtctcaaaaaataagtaaaaggaaaataaataaataacaaaataatgtttaaacctctaccaagctgggaggttcagaccctgagagatgccttactagatatttccattaacttcagcaagattgggtgaatgaaagtaatttgtgttggtagcagcgttccagttgtcagcaaagtgacagatatcactggaggtctgctttgagtcccttcatggtgaccaaaatgtcaaccttaaataatgagattcagaaaatatgataaaatatagggtttatttaaacacaaagtatgatctgatcactgtccatttgtttttgtgggctggttgctgaagggtcagagttctgtcttcatgtatagtctggtcattgtccatttgtatatcctccagtcccttgctactaaaaacaaaaatgacagccacctgggaaacacagaccccaaacacgtgggagcaagtgttccaaagtggggaagttgagtttccatttatataggcagttaacagggttgtaacatttttccatacaaggtcagtccatatgttatatgttatagtttgttacatttcaaggaagtgattggttacagtttgttacatttcaaggaagactgccttaacattcagtgatcggggtgataatttgaagagatcttgagctacaaggcttttcctagtcatttacagtaaaagcagaacttgcagcggcatgctactggctcaggtcatagaaccacattcctctcaaggctcaaaattatctaaaattctgccagctttaaatttgaattactcagtttcacaccatcataggcctaagctcacattttattcaaaacaacttcaatgtagtatagataaattttcataactctttgtaagttgatatgatttatctctttaatattaacgaaatttaggaattaccttctgatgtttgctgcatatatatgcacagattgatggcaaatattttattgcactatttagttctgtattatactatcaacattactgtttttctaaaataaagcagaatcttttctttgttttaaaatgatctcagttcccaaggaagaaactacaccaatttgagtctgaaatatcaaacattgaagaatacaaaatttattttctaagcagtgaaaaaccatgtatctaatgaagcaagttggttcagatggtgtagctggcaaacaggacaagagctacgtagaggtagcaagactgaaacttgatcttggttggaatggaacaaaatgctcatagtattattattattattattattattattattattattattattttcgagtcagggtctcactttgtcacccaggctggagtgcagtggcacaatcatagctcactgcagccttgatctcccaggctcaagtgatcctcctgcctcagcacccccaagtagctgggactacaggtccgcactaccatgcccagctaatttttttttttttttttgtagagatgggattttgccatgatggccaggctggtcttgaactctgagcttaagtgatctgcccaccttagccccccaaagggctaagattataggagtgaaccaccgtgcccggcctagtgttaattttctttttgcatgatttttacactactatgaaaataagcaaagtccacccaaatgagaaccaacagaattcatttattgaaatcttgctataacaaggaagtcagccaacatcgctttcgttgggcagactcaaaaacgagtaggcaagttttatagtgaaaaaaatacgttaaggtatgatctaattggaggttgttggcatggagaagttgaaggccagctatctaaaagcagagcatcttagggaattaattcaggaaacatagttggctttctgtggttggccttgagttgaaatcatgcaggggttggggcacaaaaatagagaagctggtagtcattgatcaaatcctcgctgtcctggggtgattgctgccaagattgtaatttggatttgcaggctggttgctgaagagattgtaggtcagagttctatcttcatgtatggtctggtcattgtccatttatatatcttctaatctctcactactgaagaacaaataaaaatgatttgtgttttataattttatggaagaatatattcatgtagctttgagagatttgaagattctaatagttacagaaatcttcccagatgaaaattatattttatgtctgagaatataagatgaattatgtttatactgtaagatatctttgcaaagttcttgttacagtagaagtagattctggacctcaaagatatatcagttacaataataatatgtacttatggggtcttttgagaaattataacctggtttgtactacctcagaaagattgagcattttctccatgacttattggataattgggacttttaaagatgtaagaaagaaagttactggtatatcaccactggaaactcctcacattgcaattttctatagaggaaatttgttggctgtgatgaatattatatttaagtttctacagttttttaaattaaatttttattttgagaaattttcaaacagaaatattttatataaaaattatacagcatcaatagataaagctgaagtatcctttatcctctcccctcctgccccattttctgtcccctttcttcctgtaagaggcaacctctcatgaatttggtgtgtgtccttttaactcataaaatcattatttctaaaaacaatgtaattgcccttacttggctaattataaacacaaatatggaagttttgaaagacttactttctagattcttttagattagtaaattattataataagcctgaaaaacagaacattattcaccaagtaattcaaccaagtaacatatattctgtgttaaatagcatattgtctttgtattggtattaatgtatctaattagtggcaggcatctaggtctctcaaggaaggaagaaggagaatttggggaaaagaaccaatgaaagaaagcacagattgacactttgagaaatgtgtaaaaaatgagtcagaggtttttctcttgatcttggctgaaagtatagctaggtctcaagtttgctttgatctttttttgcctggcccttacagaagcaatgctttttctttgtttcaaaatgaatgggcaaatatatatactatacttgtcaatctcagtgttttaagtattgccaatttgacaccaatgtggcagaaccaagttcaatttgttaagagtttaatttattctccaaatataagttgcttctgttttataaatacctacataaaaagcttaagtcccagcaataatttaataaaatcctatgcatcttgttttaaatactcctgtgattcacagacaatcacagttgactgaacaaaaacctatatttagtaactatttgaaaggtactgtaattaagtctgttttagttctaatcattactaacaccgtggataatgcaggaaagggggaaaacacagctcatcaaagaagagacccatgagatggatatagctagtttaatcatagtaaaaaaatcccaaggatgttgacacatctgtactatcattaatgagagatatagtacaaagacttcatctgaaaaggatgacttcatggagtatcaatgactttacatctcttcaaaggataaaaagggtttatgtttttctggtgcctgaatgttttaacttgttacattgactgcatgatgagtactatggtttgtgatttaaatgtattatgaacataattttttctttgcatctaaaattttgtttttggcttaaggaagaacccaaaatgctattcattcactggtagtatatctgtgatttgtagcatgttctataaaatttcatctccaaggataaaaattttcttatatttgtacataaataaaacttttgtgagcttgattaatttttaaaggagttatacttttgttatccttaacttttaaattggagtattttctttgtattaataggcagaagactatagccttaattttatcagtaggttaggaagcattttcctatatttaatctctatattgctttcagtttttggctttcttgaggataaacaaaatgtcaattactagggaattctacaatctgagagtgataatttgaaatctgttataatgacataaagatttattttttgatatttttataggaaatggaaatactggcaaactaaaaatatttgtttatggctacttgttatttctaatcctcttcctaaaatgtaaggaattaaaacttgaaaatttatttatggaatggtaaattagaaactgatagtaaatcagaagactgacgataattaaaacattataatattgggaaagtagctaaagaagaccttggaaaattattattagatgtcttcaggaagtggctgtaaaaaatatacctgtcagttgacaaatgtgcattttattttattttttttttgagacggagtctggccctgtccgccaggctggagtgcagtggcgcgatctcggctcactgcaagctccgcctcccggtttggggccattctcctgcctcagcctcccgagtagctgggactacaggcacccgccaccacgcccagctaattttttgtattttcagtagagacaag[148 bp omitted]aatctatggcgtttgaatttaagatgacgtttcaaatagacataaaatgttttgctttaagattttacaatataatacaactatttgcatagccaacataggtagccttggtacctcattaggtaaagtggagttttttcctcattgttaatgaaaaggataaggttccctaaaagagagcaaaaaggaaaataagatattgcttttaaaattctcttctttaattcctgtttttcagaggatagctggctcacatattatgtttctaaatttatcagttccccgccaatgagacaaatacatctttacaaagatttatagattgctaggagttttctggtccatatttacaaaaaaccctcaatttctaaacaaattatattctaaaagtttgttttaaaatgtattttagaatttttgatatattttttccatagaaagagttataaatggtaggttcctaggccagtccacagaagtatttttaatccataaagtagtgaggaataaagatttgttttaaatatttttatattgaatttaatgctggcaatttaaggaaagcagttagtgtgaatcacaggattgggaaacttgtatggaaattctaaaaaggacttatggatacattaaaattggcttcagaaactatttctaattttttgtctaaactccccactatcttttgcaaatgcactactattcttgggattaatagctcacaaatggaacaatgagagaaattttctttgagtggttaggtgtagctgaaagagggattatggtaagaggatccataaataataaaaatttgatatgtgatttatatctcagtgaagctgttctttaaaaagtaaaaaaaaaaaattatggttctgtttaaaaagaaaaaagtgaaaaataaaaataagaaaataaaagcgtgaaagaggaaataacttcttgtgactaaacttccaaataacaaaagaaagagtggctttacattacttagttgtttgtatttgttatgataaatgtcaagtaagccattaatttttactaaattcagtaaaaaaccttaatctgacagctagggaaagaaacaaatggcaaatatagagtagatgatcttttttttgttttttctttttatgagatgaagtttcgttcttgttgcccaagctggagtgcagtggcgccatctcggttcactgcaacctccacctcccgggttcaagggattctcctgcctcagcctcccgagtagctgggattacaggcacgtgccaccacacctggctaattttttgtatttttagtagaaatggggtttcactat[138 bp omitted]ttggaggattcgtttagagtattataaaatatagcctacaaaattctgaagaaaactaacttttgctggccaggcgtggtggctcacacctgtaatcccagcactttgggaggctgaggtgggcagatcacctgaggtagggagtttgagaccagcctgaccaatatggagaaacctagtctctactaaaaatacaagattagctgggcgtggtggtgcattgcctgtagtcccagctactcaggaggctgaggcaggagaatcgcttgaacctgggaggcggacactccagcctgggcaacaagagcgaaactgcatctctaaaaaaaaaaaagaaaaaaagaaaactaacttttgctcttctaaaagagatgccaaacttaaatgattttattttcctcaccttgccatttatttttcctccttttgtcattcaggacttttgctagagatgacagtaggatgtctttgcaataatccagacactggaatttggcagttaggaggcattttagtctttagactactcagtttactctatattgactagaatttttagtgaaggatcttaatctcatagtctatgtcacaaaatgtacatcacagcgttttttcacagaattaggaacacatacattatttttaataactttgaagcaaaaggctacttggagtgcattatctccacatactatatataatatttataatattttatatatataaaagacatggtctcactatgtttccaggttgaacttgatcaaactcctggactcaagcaatcctgctacctcagcttctacgggtgtgtaccactgtgcttggccaattgtttactctgtatttttcaccatgaagttaaaacc[162 bp omitted]tctcctgcctc[199 bp omitted]tatttgggcttcaactttattcccacacacatttccagaacccttgggctttggaggagtggcaaaactccacttccatcctcttagggtcccagctgggtctgagaattaaattgacataagacattaacaggagaaaaacatacaaatgtatttaatacaaatttcacacggcatgggagccctcgtaaggaactgaagacccaaagaagcagttacagtcaatcactggtatactgaattggacaaaaaagtagctgtgaaaaagcagctaaattgtgtggggaggcttaaaagataacagttattttaacaaggtctgtacagaattcctttggtctcaacttcatccttgaggataaggatgttttattccttttggtatagggagggtgtctttcacatgggaatttcatctcctgcttttaagaaacagaaaagaggctagaaggatctttttgcacctgctgcttttcaagtgcctttaattcaaaatagtcaatatgtcagagtggtatatttttaactccttcagcttaaatggaagattcatgttttcttgaaaggattaggaatatgaagtttcctgcagaattttacaccaaagatgtataaacataagaactttaccagaatagggcagtgagagtctgaaacaatctttcagggaaaatctgacgatatctcctgaacatgtatgtaatcttttggctagactcacagacttcctaaaaagtatgatggtaaggagaaaaatttttcttctgattctgttgtgaaagagtttgtttgtttgtttgtttgtttgttttcttttgagacaggatcttactctgtcgcccaggctggagtgcagtgacacgatctcggctcactgcagcctcgacatccagggctaaagtgatcatcccacctcagtctcctgggtagctgggaccatgggcacatgccaccactgctagctaattttttttggtatattttgtagagatggggttttgccgtattgcccaggctggtctcaaactcctgagctcaagcaatttttttttaaactggtgatggttcacaacttgtgatacctaagtttgtgtatatatcaataatatatataaacaacatgcaatattcatttcctgtatattttattctatgttaagttttttggaggtaactttgtctactcagcaagtagaatgttacgcagcaagtaaagtcattattgttttgtttagtcttgctttgtttttgcaatcctaattaaggataatattcacttcccatccagagagtataccaatcctttttattctgcttttcactttcccgtttccttctttttctttctcttttaaaacttacacaaatgtcatacatgaaaacactgccattgcaaaaacttccagaaatagaaatacagaaggctgggcgcagtggctcatccctgtaatcgcagcactttggaggctgaggcaggtggatcgccttgagcccaggagtttgagaccagtccaggcaacatggcaaaatcttgtctctttaaaaaatacaaaaattggccgggcgtggtggctcacgcctgtaatcccagcactttagaaggccgaggtgagtggatcacaaggtcaggagttcaagaccagcctggctaagatggtgaaaccctgtctctactaaaaatacaaaaaattagccgggtgtggtggcgagtgcctgtaatcccagctacttgggaggctgaggcagaaaattgcctgaacccgggaggtggaggttgcagtgagccaagatcgtgccactgcactccagcctggtgacagagtgagattccatctcaaaaaaacaaaaaacaaaaaacaaaacataaaaattagccaggcatgatagtgtgcacctgtagtctcagctactcaggaggctgaggtgggaggatggcttgagcccagagacggaggttacattgagccgagattgtgccactgcattccagcctgggcgacagagccagaccttgtctcaaaaaagaaaaggaaagaaaagaaaagaaatacaggccaggcatggtggctcatgcttgtaatcccagcactttggaatactgaggcagttggatgacttgagccccaggagtttgagaccagcctgggcaacatggtgaaaccctgtctctacaaaaaaaaaaaaaaaaaaaaaaaaattagccgggcttggtggcctgtgcctgtagtcccagctatttgggaggctgaggtggaagtatcacctgatcccagggaggttgaggctgcagtgagccattatcatgtcactgcactatggccagggtgacacagtgagacccagtctcaaagcaaaaaaaagaaaagaaagaagtacaataaaaagcagtgttacctttttcctttcctcttctatcttattcccctctccagaaatcactactttgatgtttcattcaaaatctttttctgtttatttacatactatttctatataaagaaacatggtttgcagggaattttcctccttttatataagtagggtcatactgtctatatttttagcaacttgcattttttttttgagacggagttttgctcttgtcacccaggctggagtgcaatggtgccatcccggctcactgcaacgtctgcttccttggttcaaacgattcttctgcctcagcctctcgagtagctgggattacaagtgcgtgccaccacgcctggctaatttttgtatttttagtagagacagggtttcaccatgttggccaggctggtctcaaactcctgacctcaagtgatccgctcacctcagcctcccaaagtgctgggattacaggtgtgagccaccgagcctggcctgcattgtttttcagttaatgaaatgtagaggtctttccgtagcaatactactatttaactacaataaccacttcataatgttccacagaggtttatttaaccatactgaactgatgggcagttaaggttttatgtctgtcatcaaaattctcagattttctcctctcctattttttctgtttttctgttttattctgttctgtctgagatttcctcaactttgtccttctcttaaggttttcatttttgttattactttcttttttttttttttttttttgagatggagttttgctcttgtcacccaggctggagtgcagtggtgtgatctcggctcactgcaacctccacctcacgggttcaagcaattcttctgcctcagcctcccaaactagctgggattacaggcgcctgccaccacgcccagctaatttttttgtgtttttagttgagacggagtttcaccatgttggccagggctggtcttgaactcctgacctcaggtgatccacctgccttggcctcccaaagtgctggattacaggtgtgagccaccgcgcccggcctgttattacatttttaatttatgtaagtttttctgtgtgtgctgaatgttttttaaaagttttgtttgttacagttatctcttggaaataatttttttcctaatgttttcttctgctggcatagtttctttctaccagattgctttcttttcttttgttaattttagtctctattttccaaatacaggctttctttaggt[144 bp omitted]gcctcccgcgtagctgggactacaggcgcccgccacca[187 bp omitted]tgggaagcctaagtacatgggatggggcttgtagattttcagttttactgtaggatgacctggttggaagacatttgttagggaaccttctgacttcaacccaaatttaccaaaaaaaaataaaaataaaaaattctaatctactgggctcaatcgaatcggggaagagggcttctgatcttagaattcagcattcatctgtgcatagggtcacttagtctccttgtttttcagaatgatacctgcgtcctctactgtacctggtgtcctctaatctccagagaataagctgcagacttctgccatgattgagttattagggagagatggtcacctggagatgtggaatggaggaaggaaatctaaggatctaacagcttcttaaatatctttcatccaatttttcttattttatccattccactcccaacttacccccagttccacaggtccatagtcttgccaattcttatgcctttagaaaattctgtggtatatattgctttcctcactgccagtttaggacttggctcattcagctttcctcactgccagtttaggacttggctctctttggtcggctaagtcagttaccactctgtcatctactttctgatttacaaaaatctgttgctttttttcttcttctcttttcctccttatcctttgggattatgtattttaaaatttgccttaatttttgtcttagtagggtttctgaaaggagtacattgaatattaatattagatctgccctcttatcctgggagtctcttatgttatttctttgatagagagactgcagtacatagtagttgagagtgtgagttatagcaccagactgcttgggtttgaactctgagtctgccacttactagctattagattaatctctacattcctattttcctcatctgtaacatgggggataatacttcctttgtagggtgaccagagaattaattaattagttaattaaaattaacttatgtaaaggacttagagcaatgccttgcacatagtatacccttaatgaatattcattatcaatattatcttccctctcttttctctgtcttattttcctagaactcctgttagtaaaatattaatctccttagatttatccttgaagtatcttatttttctttcatacttttcatctcatgtgtagttatactttcctgggaattcttgtaacctctgcttaatgtcttattttaacaatcttattttatttatttttttgagatggagtcttgctcttttgcccaggccggagtgcagtggcgtgatctcggctcactgcaacctctggctcccaggttcaagtgattctcttgcctcagcctcctgagtagctgggattaaaggcacttgccaccacgcctggctaatttttgtatttttagtacaggtggggtttcaccatgttggccaggctggtctcaaactcctgacctcaggtgatctgcccgccttgccctcccaaagtgttgggattacaggcatgagccaccgtgcccagccaacaatcttattttaaatatcaaacagttcttttgacatctgattttaatctttcatgttaagggattttctcacatgtccgatgacctttggtagtttgtgcatatttattttaaattgattaaaagctctttaggaataaaactaattgtggagtaagtaaggaataagccttacttttgggtgttaggatggacataattattattatgaagaggatcttttctctcagattgtgcaatgcctccaaaaagactttcaatttctcgcctgggcaataaagtggaagtgtttcgggtcagtggtggggtggagtgggagagtgggtaggggaattaagtcccaccctttggtatttcaagaaatccatttgttttctatctatctgtcctacgtctactctattttgcctagtgtcctcatgtctggaatacccctcttcaatttctcaagaggatacactgccattctccaaccaagtcaggggtgtatacacttagctgctagcattctacacatgggagtagggaggagaatcaactgttcacatacacagacttttatcctggtttttcactttgtgcttcctcactacccactgggtacttccaaggtcagaggttttcccagattctttgggggtgaattggctttcttctcaccaatgtccccctttgtaatttcctgagattatagcttcctccactataacaagtcagataccactcctccatttgttctcccttttctaaaaatatgttatccactgtaaaacatgctatgtactccctcttctatttgattgtccttgaggatttaaaccttttaaattatgttgccatcattttattaggggagcagagaaatacatatgcttgatcttccttttctttttgacagaagtcatcagatgaatgttattttaaaatattattgcatttaactatactatttaattatataatgagctggcattccctagtacacctggaaaaagtagtccagatttgttcatatagatgtagagtttggctgccatgaccacaccctcctctttataacaagcaagtggtagtgaacaaactcaggtcacaggatccaatggaaagagtttgaattcccatagccggggcaggttcctttacctatggttaatgttctagagcttgactttccccatctctgctagaaacagactttactcagccacaattccattttcttttatttccccttttgcctttactagcttgaattactggcattaactgaggattcttcttctctgacatacaagaaagataaggtccatttggtacactctgaacatccatacagtggaatactactaagcaattaaaaagaacaaatgatgcatgctttaacatctgtgaacttcagaaacattacgctaagtgaaagagccacatgcaaaagattacatatgaaaggttgagaaagagcatatctatggagatagaaagcaagttagtagttgcctgaggctgggatgcctagtggtggggagactgtgcatgtgtaggggcaaagagcatatgggaactctctgtacttcttcagttttgctgtgaacctaaaactgctcttaaaaagtctattaaaaatatattttaaaatgtcctcaaataggaattacactttaaattataaaaatgttagcactgcatatataaagctctgtgcatcctaggtagcaaatttaaacaaaattactatagcatttaattattaatttattgggatttaggtttattgacctcatacctcataagtgaggccttcttcttttttttttttttttttttgagatgtagtctcactgtgtcgcccaggctggagtgcagtggtgcaatcttggctcactgcaacctccacctcctgggttcaagtgattctcctgcctc[132 bp omitted]gtctcggcctcccaatgtgctgagattacaggcgtgagccactgcacctggccccgatttttattcttaaaagtaaagaactgaaataagtgaatgcatgaatgatatggctatctgggtgaaaagctttctaggcagaggaatcaataagtatagagacagttaggtaagagaatgctcagcaggtttgaggaatgacagagagatttgtgtgacttggaacaaaagtgaaagaatagtattacaaaacaaaatcagagagctggcagtgtattagatcaagtagggtcttgtaagccatggtcaggattttgaatttttccctgagtgagatgggaaggctgagcagaggaaggacatgatctgatttgcatttttaatggatcattctgggtgctgtgtggagactagagtaggaggaaagaatgtagaaaaggggaaagaattagtagtagttgtccaggtgagaaataatgatagcttagatcagggaagtagtcttgaggcagtaataagtggtcaggttctggatatattttgagagaagaagcaataggacttgtttatgtggtgtacgtgaagggaagaatcaaggaagcataaattcaatgattttgactagagcaactggaagaatggaattgccccttactaagatggagaagagcaagcttaaagggaaaaatcaagagattggttttagacacttaagattacctgttcaagtggaaatattgagcatgtatggttagatgtaagaacctgaagttcagaagagaggtatgactggaagatacaaatttaagcattggctgtaagtaaatggtatccatggaactggctttacaattacgcactatacatacaatgaaaacttcgtctgttttttttttcttttt[132 bp omitted]acctccacctcctgattcaagtgattctcctgcctcagcctcccgagtagctgggattacaggtgcccaccactgcgcctggctaatttttgtatttttagtagagacggggttt[138 bp omitted]atttcctgttttaaaatagaatttgaaatcagcagaaaacttttggcattgtcaacctcatcagtttctgcaaattatcttccaaaactacaaatggatatttaaaattcataatatgtagctcttaattattagatagttgaatgtcatttaagaggtgcaggccattcagcaagagatagaaaaagtgtcattatgaatttaaaatttaacattttagacaggtatggatttatggcatcattctcaatcatgacttcagggtctatgtgttctcttaggttcatttctttaattttctctattttaatgtaaaggaaatgtgaaaatttgaattacattcttcaaagttattagaatcattataacaggaagtgttaatgttaaaaagtctttatcaagacctaatattaaattatataacttgcttgttctacttttctataaaggttaaccttataccaacttaactgcttaaggatattacctgcttctttttcattataatgagcaaatctgtgtgtgggagttcatacagtatttgttcattggaatcactttcagaaaatgacagttcagttctgttaattgattgaagaaagctttttaaaaatcattttaggccaggtgcggtggctcacacctgtaatcccagcactttgggaggctgaggcaggcgaatcacgaggtcaggagttcaagaccagcttggccaacatggtgaaaccccatctctactaaaaatacaaaaaataactgggcgtggtggcacatgcttgtaatcccagctacttgggagggtgaggcaggagaatcgcttgaacccaggaggcggaggttgcagtgagccgagaccgtgccactgcactgcagcctggcaatagatcgagactccgtctcaagaaaaaaaaaaattattttagatttttttctactgcagtttttaccatactgcttttgacactatccacaattatacttagtagaaatgctaaattggtaaaattatgccacatctccttctgtaaatttctactctactcttatgtggttgcaagtacatagctatctttatgtgagatattactgcccttgctagaaacctcaaaatacctcataataccaagcttatttttaaagtgatggttttaaaggctatgcataataagcttcagttgtcttcagtatagttgattattcattacttattcagcatgaggtaatatgctatgtgtatctaatcaaagtaatcagtggtttctataaataaattgtagtcgaagaagcatgttaattagtaaataaacacacagttgcttctcaatttacattagttatgttccgtaaagttaccacaaacactgaatcagtgaatatagaagcattgctcctagaggaaatagagggttaggttcctgtgagcctctgttcatgacatttttatcaaccagtcaatacaaccttgttttatatgtgtttctgcttaaagataccgtattaaatatatattgttgattcattaacactgaactcaaggccaagagttaagattatttaacacaactatttttttcataaggcacctcataaccttcttatgtgtcagaacactagatagcatatcagcattatgcatggggaacgttgtaaacagcaaggttatcagcacaaagcataaaaatgcgaaaaacatagcgtgaaagagactgagaaaaggacgctgtgagagctaaaacaagaaggcaaaacaaacattactttgacctgagctgggaatgtgtgcttcaggtaactcaaatttttaccactctgtacatgtccatgaatgactgtgaaagtattgacttaggggttacaaataaattttagtgactatgtggatttgcaaatacagaccctgcatataatgaggatcaactgtatgtatgtgtgtatataaacatacacacatatatatatatacatgaatgttttttcattcctgcctggaatgcattttaatctcttttctatctgttgtattctcactattcagctcccagcttggatgttatcctatctcagaaacctttcccagctctcttaaatactcattgagtatgatctcatatccctgtgtacatgccttgtataatatttttcacattttgtgttaattctttaccaggattctttaaactgtgagctccataatggcaaggaccttttctcatttacctctgtattcttagtacttaacacagggactaacacacagttgaaattaaataatttttttttctttttttttgagacggaattttgctcttgttacccaggctgcagtgcaatggcgtaatctcagctcactgcaacctctgcctcacaggttcaagtgattctcctgcatcagcctcccaagtagctgggattacatgtaccaccacgcccagctaattttgtatttttagtaaagatggggtttctccatgttggtcagggtggtctcaaacccccgacctcaggtgatctgcctgccttggcctcccaaagttttgggattacaggcatgagccactcgcacctggtgaaattaaataaattttaaatgaatgaatcaataagcctctctgcaaatggatttattattattattattattttgagatggagtcttgctctgttgcccaggctggagtgcagtgatgcagtctcggctcactgcaacttccacctcccgggttcaagcagttctcctgcctcagcctcctgagtagctggggttacaggtgcatgccaccatgcccagctaatttttgtatttttttagtagagacggggtttcaccatattggccaggctggtctcgaactcctgaccttgtcacccacccatctcaactgcccaaagtgttgggattacaggcatgagccaacgcgcctggctggatatatatcattttaatgagtctatcttaattcaaaattgcagactataggaaatggaaatgttacacattttataccagtaaatatctcatgatctctatttttgttggttctttttcctttggatgaagctgctctatttggaaaggaacatataa[133 bp omitted]acctgcacctccccggttcaaatgattttcatgtctcagccacccaaatagctggaatcacaggcatgcgccaccatgcatggctaatttttgtatttttagtagagacagcattttgccatgttggccaggctggtctcaaactcctggactcaagtgatctgcctgccttggcctcccaaagtgctgggattacaggtgtgagccaccgtgcatggccatgttttacatctttctataaaacaaagacttagcacagaaatgcactaggctctgtaccaaactatacagattctaaactgcagaggagaaaatttatacttaggtaaaaattaggatacatgcttgtgttacattttaattttgaaatatttcaaggccggcatggtggctcatgcctataatcctagcaatttgggaggctgaagcaggaggattgcttgaggccatgagtttgagaccagctgggcaaacatagcaagacccccatctctacaaaaaatttaaagtagctaggaatgttggtgcatgcctatattcccagctactcaggaggctgaggcaacaggattgcctgagcccaataattggaggttgcagtaagccacgatcacaccactgcactccagcctgggtgacagagcaagagaaaccctgtctcaaaaaaataataataataaaatgataaaataataaataaatttctgcgctgcagaggacactgtcaggaaactgagaaggcaagctacagactgggagaaaatatttgcaaaagacatatctgataaaagcatgttagccaaaatatacaaagaactcttaaaacaataagaaaatggacaacccaatttaaacatgggcaaaagacctgaacacacactttaccaaagaagtacagacactttaccaaaacaaatttttatatggcaaataaacatatgaaaaaatgctcaacatcgatatgtgttagcaaattgaaacaataatgagataacactacacacctattagaatgataaaaatccaaaaccttgacaacaccaaatgctgacaaggatgcggagcaacaaaaactctcattcattgctggttggaagacaaaatggtacagccactttggaagaagtttggcaatttctcacaaaatgaaatgtactcttaccatatgatccagcaatcatattcattggtttttacccaaatgatttaaaaacttatgcccgcaaaaaatactgcacagaagtgcttatagcaactttattcataattatcacaacttggaagcaaccaagatgtcctttagtaggtgaatggataaacaaacggtggtgcatccagacaatggaatattatttagcactgaaaagaaatgagtcatcgagccatgaaagacatggagtaagcttaaatgcatattacttagtgaaagaagccaatttgaaaaggatgcctattgtatgattgcaactatataacatactggaaaaagacaaaactgtggagacaacaaacagatcagtggttttcaagtattgaggagagggatgagttggcagaacccagaggatttttagggcattgaagctattctgtagaatgctataaagatggatatatgttattatacatttatcaaaacccacagaacattcatcaagagtgaaccttagtgtaaactatggactttgggtaataatgatgtggaatttgggtcaatgtgtgttcattgattataacaaatgtaccactctgttatgggctgtcgatagggagggaggctggtgggtgtgtgggcacagggattatatgggaactctctgtactttatgcttaattttgctgtgaacctaagactgctcttaaagtctgtttttggccaggcatgatggctcatgcctataatcccagcactttgggaggctgaggtggaagaactcctgaagccaggagttcaagaccagcttgggcaacatagtgaaatcctgtttctgcaaaaataattttaaaaattagctggatgtggtggcaaacacctgtagtcccagctatttgggaggctgaagtggtaggatcccttgagctcaagagttcaagttgcagtgaaccatgatcacaccactgcactccaacttgggcaacagatcaagaccctgtctcaaaaaaaacaaaccagaaaaaccaccaaaaaacaaaaataaagtctatgtatttatttatttattttgagacagagtctcgctctgtcgctcaggctggagtacagtggtgcaatctcagctccctgcaacctccagctcctgggttcaagcaattctcgtgccgcagcctcccaagtagctgggattaacaggtttgcaccaccagacctggctaattttaatgaagtctattttttaaaaaattgattcaagaggcaaatttaataaaattagtgattattaccattttatcaagaatattcttaacattcttaagtgaagctggatttaaagcattttttttctgcaagtgaatgatagtaaaacatgccatgactgctagtatagtttggtgacactgcatggatttggatttgtgttcaggtgccagcagttttacccataattgattttgcaccatcagtgaaaatgtcaccacaataacttcttagtattattatgaaaatagttctgactattttcaagaaggatcttagggacccatagggctcccttcaggagcttcattgatctttcccatgtatattttccatatacacacacacatacatatacacacaaacacacatacacacattatttaaatatattaaaccattataattgtttaatgtttttttaataatatactccttattctttttacaacttatattttttgtatttgaaatttatttgaaatttattcgagttgatgtatttagctctagatcattcatttcaactgttctggagtaaaacattgtttgataatacagacattcctcattttattgtgctttgctttattgctcttcacagatgctacattttttcacagattcaaggtctgtggcaactctatgttcaacaagtccgttggcaccactttttcaacagcgtgtgatcacttcatgtctctgtcacattttggtaattcttgcaatatcccaaacttcttattattattatatctgttatggccatctgtagtcggtgatctttgatgttattattgtaattttggggggtggcaccacaaactgcacccatataagacagcgaacttaataaatattgtgtgttctgactgtttcaccaactggctgtttccccatccctctctcccctttccttgggtttctctgttccctgagacacaacactattgaaattaggccagttaataaccctacaatgggctaaacgttcaagtgaaaggaaaagtcacgtctctcactttaattcaaaagctagaaatgattaagtttagtgaggaaaacatgtcaaaatccaaaacaggccaaatgctagggctcttgcactaaagttacctgagttgtgaatgcaaaggaaaagttcttgaaaaaaattactccagtgagctcatgaatgataagaaagtgaaacaggccctgtgtgatggctcatgcctgtaattccaaaactttgggaggctgaagtgggaagatcacttgagcccaggagtttgtgaccagtgctggcaacagtgagacccccatctctacaaaaaataaaaataaaaaaatagatgagcatggtaacacatacctgtactctcagctactcgggaggcttaggtgggggtactgcttgagctgggagatcaagactaaagcgaaccatagcgacacgactgcacttcagcct[136 bp omitted]cggttaaaccccgtctctgctaaacatacaaaaaaaaaaaaaaaattagctgggtgtggtggcaggtacctgtagtcccagctacttgggaggctgaggcagaagaatggcatgaacctgggaggcggagcttgcagtgagccgagatcacaccactgcactccagcctgggtgacagagcaagactctgtctcaaaaaaaaaagaaaaagaaaaagaaaaagcgaaacagccttattgatgatatagagaaagttttagtggtctgaagagaagattgaaccagaagcaaaattcccttaagccaaagcctaatccagagcaaggccctaactctcttcaattgtacaaagtatgagagaggtcagaagcttgagaagtctggctgggcatggtggctcatgcttgtaatcccaacactttgggaggctgaggtgggtggatcacctgaggtcaggagttcaagacctgcctgaccaatatggtaaaaccccgtctctactgaaaatacaaaaattagccgggcatggtggtgcatgcctgtagtcccagctactcgggaggctgaggcaggagaattgcttggacttgggaggtggaggttgcagtgagccaagaatgcaccactgcactccagcctgggcaacagagctagactccatctcaaataaataaataaaataaaaagaagttgcagaagtctgaagctagcagaggttggtacatgaggtttaaggaaagaagccagctccgtaacttaaaagtgcacagtgaagcagcaagtgctgaggtagaccctgcagcattatccaaaagatctagctaagatcatttatgaaggtggctacactagacaacagactttcaatgtagacaaaacagccttctattgaaagaagatgctatctgggactttcataactacagaggataagtcaatgcttggcttcaaagcttcaaaggacaggctgactctcttgtcaggggctaatgcagctggtaactttaaattgaagtccatcctcatttaacactctgaaattcctagggcccttaagaattatgctaaatctactctgcttgtgctctgtaaatggaactgaaaggcctggatgacagcacatctgtttatagcatgttttactgaatattttaagcccactgttgagacctactgctcagaaaaaaagattcctttgaaaatgctactgccggcc[141 bp omitted]gtggtgggcgcctgtagtcccagctacttgggaggctgagg[139 bp omitted]gcaatgcacctggtcacccaagagctctgatggagatgtacaaggaaattaatgttttcatgtttattaacacaacatccccattctgcagaccatggatcaaagagtaattttgacatttaagtcatgttttaagagaaacattttataaggtatatttgccttagtgattcctctaatggatataggcaaatacgttgaaaactttctggaaaggattcaccattctagatgtcattaagtacatttgtgctttgccactgctgaatcagtggctcagctatgtgcaagattaggcttcatctgtaacccaccaccgtggctgaggaagccattgctgctgaaggtgtaatggatgttaagaatactttataaggttgaggacagtggctcatacctgtaatcccagcattttgggaggttgaggcaggaagatcatttgagcccaggagttcaagaccagcccgggcaacatagcaagaccttgtctctacagaaaattaaaaaattagcgaggtgtcggctgggcacggtggctcatgcctgtaattccagcactttaggaggccgaggcaggtggatcatgaggtcaggagtttgagaccagcatggtgaaactccgtctctactaaaaaaataaaaagattaaccaggtgtggtggtatgcacctgaaatcccagctactcaggaggctgaggcaggagaatcacttgaacctgggaggcagaggttgcagtgagctgagattgtgccactgcactccagcctgggggtgacagagggagactgcgtctcaaaaaaaaaaaaaaaactatctacaaagaatctacaaagaacttaaacaaatttacaagaaaaaatcaaacaaccccgtcaaaaagtaggcaaagtatgtgaacagacagttttcaaaagaagacatttatgcagccaacagacacatgaaaaaatgctcatcatcactggccatcagagaaatgcaaatcaaaaccacaatgagataccatctcacaccaattagaatggcgatcattaaaaagtcaggaaacaacaggtgctggagaggatgtggagaaataggaatgcttttacactgttggtgggagtgtaaactagttcaatcattgtggaagacagtgtgacgattcctcaaggatctagaactagaaataccatttgacccagcaatcccattactgggcatatacccaaaggattataaatcatactactataaagacacatgcacacatatgtttattgcggcactattcacaatagcaaagacttggaaccaacccaaatgtacatcaatgatagactggattaagaaaacatggcacatatacaccatggaatactgtgcagccataaaaaggatgcgttcatgtcctttgtagcgacatggatgaagccggaaaccatcattctgagcaaactatcacaaggacagaaaaccaaacactgcatgttctcactcataggtgggaattgagcaatgagaacacttggacacagggcgaggaacatcacacactggggcctgtcgtggggtggggggatgggggagggatagcattaggagaaatacctaatgtaaatgatgagttgatggatgcagcacaccaacacagcacatgtatacatatataacaaacctgcacgttgtgcacatgtaccccagaacttaaagtataatatataaaaaaaagaaaaacaaaaaagaatgaaaaaaaaattagcgaggtgtcatggtgttccagctactcaggaggctgaggtgggaggattacttgagcccaggagtttgaagctgcagtgaactatgattgtgccattacaccccagcctggtgacagagcctgtctccaaaaaaaacaaaaaaacaaaaaacaaacagtttcctaagaggcgctgaagacctccctcaagcatgatgacctattacatggaatttgcaaagctgccaaaaccttagataaggctttgtgtgcttgcatccatgtgtgatgagcctgtgtatgtcacgttggtggaggcccttagtgcttaacaccgtatcaccctaattaaggttgaccagaaagtaggcgaatgggtaggcttctgtaaaattgacagaggggggaaaaccctgtaaagtggttggttgcagttgtgtggtaggtaaggactatggcaaagaatctcaagccaaagatgtcatcgaagagtacttcaaatgcaagaaatgaaccaataaaactacagctcatgctcctcgaggaaaaaaaagaaaattcgtgattcatgagaggaggtcaaaatatcaacattaacagaagtttggaagaagttgattccaactctcatggatgactttgaggggttcaagacattattggaggaagtaactgcagatttggtggaaatagcaagataactaaaagagagagaattaatagttctaccctaaacagaatgcagtggtgggcacctgtagtcccacctacacaggaggctgaggtaggaggatcacttgaggccaggagttcaagaccaacctgggcaacatagtgagatacagtctcaaaaaaaaaaaaaaagtgaagaggagttgcttcttatggatgagcaaagaaagtggtttcttaacatggaatctactcatggtgtagatgatgtgaacattgttgaagtaataacaaaggatttagaatatcacataaagttagttgataaagcagtggcaggatttgagaggattaactccaattttgaaagaagttctactgtgggcaaaatgttgtcaaccagcgctgtatgctacagagaaatcttttgtgaaaggaagagtcaatagatgtggcaaacttcattgttgtcttattttaagaaattaccgcagtcactccaaccttcagcaaccaccaccttgatcagtcagcagccatcaacgtggaagcaagaccttccaccagcaaaaagcttatcacgctctgaaggctcagatgattgtgagcattttttagccataaagtatttttaaattaagttatgtacattttttagacatcatgctattgtacacttaatagactacagtataatgtaaacatagcttttatatgccctgggaaacaaaaaattttgtacagctcactttattgcaatatttttattttgcaataaagcaatatttgctttattgtggtaacctggagctgaacccacactagctttgaggtatgcctgtactatagtttctttaacctgttcccttactgatgtcattttgttccagtttggagctattacaaacaacgttgcaatgagtactcttgttaatgttttcttatgcatatgtgtaaattttctctagttatgcttgggagtggattgatggatctaggttatgctcatcttgaactttattctatagggtatacaatgtgccagacattattctaagcacacaatataaatataaatatgtaccttacaactatcctttgagataaatattattttccctattttacagattgggaaactaagacacagagagattaagtgacccacccaaatcacatagctagtaagtagcagatccaagcaatttccaaaatccaggcttttaccaccacatcatgccacagcatgatgctttacactttgggaatgaatgcatgtattttcctgcggtatgcttatctaatctcttcaattcttggttctttttcaaagtttgatgtggttaaatcaaggaggaaaatattcactagaaatattatcatcataaaaaatgtgaatatgatcaacgtgagccaccaccttgactttgatcaatagtcaggaaactaaactatcaatgttcttccccttttgaagaaattatattgcatttttt[134 bp omitted]tggccaatatagtgaaacctcatgtatgtctaataaaaatacaaaaattagccgggcatggtggtctgcgcctgtagtcccaactactcggggggctgagactggatcactttaacctgggaggccgaggttgcagtgagccaagattgccccgctgcactccagcctggacaacagagcaagaccctgtctcaaaaaataataataaaataaggccagacgcggtggctcacacctataatcccagcactttgggaggctgaggtgggtggatcacctgaggtagggagttcaagaccagcctgaccaacatagagataccgtgtctctactaaaaatacaaaattagccaggcgtagtggtacatgcctgtaatcccagctactcgggaggctgaggcatgagaattgcttgaacccatgatgcggaggttgcagtgagccaagattgtgccattgcactccagcctgggcaacaagagtgaaactcctctcaaaaataaataaataaataaaatattaaaaatgaatctaaaatataattattttataatagctaaaacttcctgttctggaatgtagcttaatatttcagactactgattgtatcatacattagtaataaagattaaaacaatgttctaaattatggaaaatgaggtaaaggagaaaaaattaaaaaaaatagacctgtatacagagttatagaagtaagctgttatttctgtgcatagtttaatgctggttggaaatttcagactgctacaagagtgtaagaatttttttcaatcttactgctaagttagggttgcagtcaaattaatttaaagtttgttatagatcttcgtgggggaaaaaatgaaggaagataaatgtttgtgttttttttttccttctgtaagttcttcagctaaaccagctatgctgcattgtatgggtggatttaggatgctggggatccctcaccatttttttaaaaaataaaatacacccattaagtatcatttatttagtctagcatgtgggatgtgaagcatttcccacagaagtcatttgtctctgtctgtggataggccttcctagggaacacttaatgagattgctttttctcctgactcctttaatgttttgtttgcagttcctaaatccaaattataaatttatcttgcagtattatactttctatgatgatgaacttcttactgacagtaacaatcaactgccatcattgttttgcttccaaagaaaaacagtctttcaaaatgcagacattttaatcattcagatataggggttgtgaaacacaaaaatataaataatgaacaatggaaaatatttattaaagtatattagaaatgtatagatccatattgtcatgtttagttggataacatcagaaatttgtatgggcaagatatataaaattattttatttcctataaattaaattaaatctgactttgaattgcccaacctggtaaaatatagattcatatcagtcattatgggaacacatagaaaagaatatgtctttcttcctttccttccttggtcctctccaacccaagagtagcgcaaaaacctaagaatcttttaggaaaaaagaaaacaaataggagatgggcccacttgtctgcagttatcaccatcatggactgatacccttattgaataagttctgcttcaagtccgatgacattattgcttttctggtcaagcttggacatgagagtctctcttgattgtgaacccccagtaactacagtccagcctcccaaggtactccatccagccattcttctttgaggtcttgccatttccttggagaacagccaggaagtaggattcaggtcacaactatccctggtgttgctgaacatttttccaatttgggcaagctgggtttagcaggctatttcccagtctcccttacagttctcaaagcttttgcctttatctcaagcttccagaaaatgaaagtttgaaggcagattatctacaaataacttctgctttccagtctgtaactcagatcttctgtaaataatggaacctgaagacctggttacctgtttaaatgaggaaagggaaaaagaagtggagaacaaatgaaaattaaaatcttatattgtcctgccacactgacatgcacacccacagacataaacgtaccacttttctgcctaatcccagcttctgggttgttcagtttttattgagttcttagaaggaagagggcctagaaaattatagattaatctgtatttgtgaataattgagaactcactaataaaatgggcaccttggatattatgtttacttcttgttgtaaaaaacagagtaaagctttgttacctagggttctcccctcttcccctgccaattattagaaaagtaatctaatattttccaaataaatatataattgtggaggactttcaatagacactaaagaatagcaaagtaacgcagatctataatgaaaccagatctgatagtgttattacttttacttgaatttgaaataatttcaaaaagagccagaaattattattgagatctatactattctgaaagctgagatagagaagaaagttgaatacatgtccactaccctcttgcagatagtgaaaaatgtgtgaataaatttataattatgacataataaataaaaaaggtactatgaaagtatagaagttgaagaaaagaagttgaagtctttcttatataatattttgcttagcagggttggcatgtactatcatctttatttgccagatgaagaaatttgagttgaaagaggttaagtatcttgctcagttacacagaataagtggtatagtagtacattcttaatgtataagtgatcagaggctggggaaatgatttctaacaagggtaataatttttataatactgcctgatatttttacactttgaatctgatttataagattgtctttctacctacttgattctgcaaagaatttgaaagttcttctcataggcgaatgactatccttgtcttaaattatctgcttatctagaagatatctgcaaaataacttgctgggattttggttggggttgtgttgaatttatagatcaaatgggaataactggcatcttgacaatattgagtctcccaatccatgaatatgaaatatttctccattaatttagttctttgatttctttcaacagagttttgtagttttccttatattagatctcatacatattttgttagatttatacctacatgtttcattttggggggtgctaatgtaaatggtgttgtagttttaatttcacattccccacttattcattgctggtgaccaacatggagaaaccccatctctactaaaaatacaaaaaaaaaaaaaaaaatcagccggatgtggtggtgtatgcctgtaatcccagctacttggggaggctgaggcaggagaatcgcttgaacccagaaggcggaggttttggtgagccgaggtcgtgccattgcactccagcctgggcaacaagagtgaaactccatctcaaaaaacaaacaaacaaacaacaaaaaacaacaaacaatttctcctatagttttgtataattccttgttggttctaggggttttttgactctttcagattttctacatagttatgttagttttctacatgttacagttttatttcttccttcctaatcagtataccttttaattctttttcttgtcttattgcattaactaggacttcaagtacaatgttgaaaaagagtagtgagagggaacatccttgccttgttcctgatcttagtaggaaagcttctagttgtttaccattaagtgtgaagctagctgtaagtcttttatagatattctttattaagttaaagaagttgccctctatttctggttaactgagagtttttatcattaatgcgtgttgaattttatcaagtgctttttctgcatcttttgatatgatcatgtaatttttcttttttagccttttgatatgatagattacattaattgatttttaatgatcatcagatgcatcaattttgcatatctgagataaatcccacttttttgtaatgtataaatctttttatacattgttggatttggtttgctaatatttagatgaagattattgcccctttgttcctgaagatattggtctgtagtttttttttcttgtaacatctttgttgggcattaaagtaatggtagtctcatagaatgagttaagttagccactgcacccagcctatttcccttttttaatttttaatttttgtgggttaataggtgcactaattaattaataggtgtattaatttttattaatagaatgagtaatggtagtctcagagaatgacttctatcttctgaaagagactgtagagaaatagtataatttatgccttaaatatttggtagaattctccagtgaacctatctggttttggtgctttgtattttgaaaggttattaattattgattcaatttctgtaatcaatttagacctattcagatagtttaattcttggcagattgagtcttgcaaggaattgattcatttcatctaagttatcaaatttgtatcaattaatttgtatcaaattaaaaatcaattaatgtaatgcatagagttcttcatagtattacttttattatcctttcaatgtccatgggatctatagtgatgtcccatctttcattcctgacattagtaacttgcatcctctccttttttcttagttagcctggctagaggcttatcgattttattgactctttcaaagaaccagcttttagttccattgattttctctattgatttcctattttcaatttcattgatttctgctctaatttttattatttccttcacccaggctggagtgcagtggcactgccagggctcactgcagcttcaatctcccaggctcaagtgatcctcccacctcaacctcccgagtacctgggactacaggcgtgtgccacctgtccagctaatttttgtattttttgtatagacagggttttgccatgttggccactctggtcttaaactcctgggctcaagtgatctgtccacctcagcctctcaaagtgctgggattacaggtatgagccactgtgcccaacccatttcccttttttaatttttaatttttatgggtacatagtaggtatattaatttttattatttatttccttctgctttctttggatttaatttgctcttctttttccagtttcctaatgtggaaacttaaattatttattttaaattttttttctaatatatgcacttaatgttaccaatttccctttaagcactgctttcactgtattccacagattttaataagctgtgctttcattttcatttagttcaaaatattttaaatttctcttgaaaatttttctttgattcatgtgttatttagaagtgaattgttggcca[140 bp omitted]gtcgagcgtggtggcacatgcctgaagtctcagctacttgggaggctgaggcaggagaatcgcttgaacccaggaggcgaaggctgcagtgagccaggatcgcgccaccgtactccagactgggagacacgatgagactccatctaaaaaaaaaaaagaaagaagtgaattgttttatctccacatatttggggattttccaattatctttatgatactcatttctagtttaattctgctgtgatctgaataagacattgtataatttttattcatttaaatttcttaatgcatgttttatggcccagaatgtggtctatctggatgaatgttccctatgagtttgagaagaatgtgtattctgctgttggatgaagtagtctgtagatgtaaattatattcagttgatggatggtgttgttgagttcaactatgtccttactaattttctgcctgctgcattttgtccatttctgagagagggatgttgaagtctccaactatagtagtggattcatctctttgtccttgttgttctaccagtttttgcctcacgtattttgatgcactcttactagaaacacacacttaaaggattatcatattttcttggggaattgactcctttatcattatgtaatgcccttcttcagccctgataacattccttgctttgaaatctactctgtctgaaattaagtatctacttctgctttcttttgattagtgttatcatggtatttttctctattttctttcatctatatgtgtctttatatttaaagtggatttcttgtagacaacatatagttgggtcttgtttttttaatccattctgacaatcatttaatttgtgcatttagactattaatgttcaaagtgattattgatatacttggattatttaccatatttgttactgttttctatttgctgccttgttctttgtttctatttttgtcttctactctttttctgctttttttttttaattttttttgagacagagtctcactctgtcatccaggctggagtgcagtggcacgatctcagctcactgcaacctctacttcccagattcaagcaattctcctgcctcagcctcccgagtagctgggattataggcacccacccaccacgcctggctaatttggtattttagtagagatagggtttcatcatgttggccagattgatctcaaactcctcaccttgtgatctgcccaccttggcctcccaaagtgctgggattacaggcatgagccacccggcctgttgttttaatttaatattttatgcttcagtttcctcttttttagcatataaattatgcttctttttatactttttttttttaaggcggggttttgctcttgttgcccaagcaggagtgcaatcgcatgatctcggctcactgcaaactctgtgtcctgggttcaagcaattctcctgcctcagccttctgaatagctgggattatagacgcccaccaccatgcccagctaatttttgtatttttagtagagatggggtttcgccatgttggccaggctggtcttgaactcctgacctcaggtgatccgcccaccttggcctttcaaggtgctgtgattacaggcatgagccaccgtgccgagccactttttatacttcttttagtggttgctctggagtttgccatatacagttataagtaattaaagcccactttcaaataacactacaccatttcactgatagtgtgagtgtattataataataaaataatcctaactcctacctcccatcccttgtatcattgctgttatttattttacctatatataaacatattcttaagcatatggatatatatacacacataagatacatacatatgcataatcaaatgtattgttgccattattatgaacaatctgttaggtcaattaagaataagaaaaatacaaggtttaatttttatcatcacttatttcttcttttgtgccctttttttttatgtgcatctaagtttctgacctatatcaattctttctttccaaagaatttcttttaatatttcttgcaaggcaggtctactaggaacaaatttcctcagtttttttgtttgtctgagaaagtctttatttctccttcactccccactgccgctcaccaccccgccaaccccacactgagacaggttctcactccatcactcaggctggaatgcaatggcatgatcatagttcaccataacctgaactcctgggctcaagcaatcctcctgcctcagcctccttagtagctaggactacaggtacacaccgtcacacctggatatctttgtttcctttttgtagagacaggctcttgctatgttgccctgtctggtcttgaactcctggcctcaactgatccccccatagcactgggatgacaggtgtgagccaccatggctgacctctcctttgcttttgaaggaatattgcagggtacagaattctaggtgggtggtttttttctctcaacccttttttcactctgttctcttcttgcttgcatggtttctgaggaaaagatagatacaattcttctctttgctcctctgtaagtaaggtgttttatttttctggcttctttcaagatttcattctttatccttgattttctatagtttaaaatgatattcctaggtacagggtttttgtttttgttttttgacatttattcttcttggtgttctctgagatttctgggtctgtgatttggtgccaagacattaccttggggaaattcttagtcatttttctttctttctttctttctttcttttttctttttcttttttttttttttttttttgagactggagtgcagtggtgctatcttggctcactgcaaactccacctcctggattcaagtgattctcctgcctcagcctcccaactagctgggattataggtgcccgccaccacacccagataatttttgtatttttggtagagaaggggttttgccatgttggccaggctggtcttgaactcctgacctcaggtgatccacccgcctcgttgccccacagttcttgagtattctgttctgtttttttcagtccttatttgcttttcagttttggaggtttctattgtatatcctcaagcttagaaattctttcctaagccaagtccaggctactaataagcccatcaaaagctttcttcatttcttttacagtgttttttatctctagcattcattttggctctttctttagatttccacctctctgcttataccgcccatctctttttgcatgttgtctacgttatccattagagcccttagcatattaatcatagttgttttaaattcctggtatgataatcccaacctctccaccatatctagttctgatacttgttctgtcttttcaaaattttttttgcttttagtatgtcttgtaattttttcttaatagccagacatgatgtatagggtaaaaggaactgctataaatagccctttagtaatgtggtgataaggtatgtagttaggggaaactagtcctgtaattagacttcattcttttagtgaggctgtacttatggactgtgagcttcacatattgttctcagggttggttttgttttttcctccaccttaggtgggacaagaaggctagagtgagctggagatgggtattgcccttcccctaggtcagttaggctctgataaaccccatcacattagactctggttagctagtttcttctgaaagaagaccttattaagaagaagagggtgctctgccgcatttcaacatggttccttttcccctcctcttgccagattcatgaggggatttttttctgatactcactgtgatgacctggtagagctcctggaggtgaaactcacaaaagtgtggggagcccctctgactgggtcttcctggagtttttgactatcagacttctacacctagtctccagcagtttgtcaattacagttcaggttttcttaccctggaattggttcctatggaggtgtctgatgggtatgttttataattctctgtatacacctgtccaattttaggagcaactgtgacctcacttctcttaagaatctaagaagtattgttggttttgcagtttgcttagctttttacttgttgttaggttggagtggccacttccaagcttcttacaagtggaaccaaagctggaagtcttccctctattgttaaaataattctcttcaaatttttttctctttattttaattgtaacacaggaataggggataacatttaaccaccatttgtgtactacagaatagtcagggccatactaaagattggagtaggccttaggaccagatgaaataagcatctggttatttcatgatttcatcatgatttcaaagggtcagttgaaggcttttcaggtgcatttaaaagtatctctactggttaataagaataatatctaaaattgtaacactagaggtttatttctttggtttattgttcttgttaaaatgcagataaccctgaagcgtttttcttttgtacgtttttaatataaagtcattcattcattcaacaaatacttattgaatgcctactgtatactaggtgctgttctgggtgctgaagataaataagtgaacattattgattgagtccttgtggagggcaagagtgagatagacattcattcacaaataaataataagaaagatgttaagaaggtactttttttaagagagtgagtgttagaaacaagagctcagagtcgcaaggaaaacaagcactcaaaccatttctcagcaaggcaaatttacttgtgcagaagggtgccgcttgcacttctggcctctgcgagagcacaccaaacaaaggagagaaggattttttatccctaacgcagtccctatccctgtgtccttcccctattggctagggttgaactgtacaatctaagctgaccctggttggctaagacttaaacttttccaattagggtaaacacacgatttgcaagggagggagggggtaggagtggtcccgctgctatagcacaaggtatgttcggatatgtctgggcaagtcagggcacaacaagagcgggagggctgcttgcaggctagaaacaagatagtacaaagaagtgaggcctccaaaccaaggacaaggacattacacaattaaaccctttgaagaagaattcactatctctggcagtgagtaagaaaatcctctctaatgttacatttaagcagagacttgaaggaagtgaggatatgaaccatacgactgtctgaagaacatttgttccaggcagagaaaatgatgcaaagtgcaaagggcctgaagtaagtgcataattggtatgtttgaggaataacaaggaggccagtgtgactggagtggattgaggaaagagtagaattgtaggagatggtcagtgtgacactgtgatttataataagaaataatacatttggtcttcctcaccatttcctgacatacagcttctaaaactcttagaacctccgaaatgatgtgtctttttgtatgataatgagacgaatgatggctggtggctcctagttagcctcaggatgggggtgctggttgccaggagaatggaccatgtgattaaaagattgaaactttcagtcatacttccttcaacccctacatccaggaaagggagaggagctgaaggttgagttggtaaccagtggctagtgatttaatcaatcatgcctatataatgaagcctttgtaaaaacccagaaaggactgggttcaaagagcttcttgtgctgaggagggtagcacacctttaactccacagggacagaagctcctgtgcttgggaccattccaaatatcaccctaagtgtctcttcatctggctgttcatttgtatcctttaaaatatcatttgaaataaattggcaacagtaagtaaagttttgcctgagttctgtaagctactctagcaaataaattggacctgaagagggagtcatgagaacccctaatttatagtgagttggtcattctacatatctccaagtagatagagtcagaaatgattgaattatagggcattcagttggtgtctgctggagaattgcttgatgtgtggggaaaacccccacaacatcttatgtcagaaataatgtgttgagtgttgagagtaggaaaagtgtttgatttttcccatgtcctacagttagcaaggtaataagtgagtttataaggatctaggcttgagcagacttaaaaaaaaaactttttaattttggataattttagatgtacaggaaagctgctaagataatatgataattacccaatgggttcttcttgcccactgcacagagagagctgatttactgagacagcagtattgcaatagcgaagtagtgtaataaacgtagagccagctgagcagaagacaggagtttattactcaagtcactccccctgaaaaattcagagattagggtttttaaaggataatttggcagcagggggctaggggactgctgactggttgagttggggatgaactcatagggaatctaagttgtcttcttactgtcttcacttcctgggtaggattgcaagaccagctgagccagctttacctgtctgggtggcaccagctggtccatcaaaatagagagtctgaaaaataccccaaacatgaatcttaggttttataatagtgatgttattcataggagcaactgaagaggttacaaatcttgtgacctctggctacatggcttctgaaccacagttctaacctcctggctaatttgttagttttacaaaggcagttttgtttcctgagcaaggagagtgttatcatctttgttttaaagttaaattaaattcctcctatagttcctcctatagttcattccgcccaggaatgaacaaggacagcttggaggttaaaagcaagatggagtcagttaggttagatttctttcaccatcataatttttccatgtcaaatttttctcactgttataatttatgcaaaggtagtttcaatattaccatctacctcttaccatttcccctaattttaacatcttacattatcatggtgtgtttgacaaaactaagaagccaaccagcatttgttcattactgttaactacattccagacttaccttgtatttcatcagcttttccactaatgtcctttttctgttctaggatccaatccaggatactacattgcatcacgtttatttattcttttgcagtctgtgacagttgctcaatccttccttcttttctatgagcataacagtcttaaggagctccaactggatgctttataggatgtttttcaatttgggcttatctcataatgttttccaaaagactagactggggttatgggcttctggaaagaataccacagaggtaatatacccttctccaggaggtagtgttaacccccatccccagtcttgagtgtgggctgactcactttctaaaaaagaatatggagaaagctgacaaatgctaccttaaccaagtgatcaaagttaatatcaccaccagtgatattatgttgatatgatgtggtgagtccagcaaattttgatgtagagataacatgtgaataggacctgattttagagacatctttgcccactttacaattttccatagactaaactcattaaaaagtacacataatctatagcaaagttattttaagtcgagatttttgacatttctccttatcttccataattatttattacttagtacccaggattgttattttcattttgtagtgtccatatgggggagaggaaaagagagagaggaagagagaaggaaggggcagactttggttgttttgctgcttttgtaataatccacaaatacatcctatcagtggttgtaattgttaccggaaaggggtcccagtgcagaccccaagagagggttcttggattttgtgcaagaattcagggcaagtccacagtgcaaagagaaagcaagtttattaagaaagtaaaggaataaaagaatgactaccccatagacagagcagccttgagggctgctggttgtccatttttatggttatttcttgattatatgctaaacaaggggtggattattcatgcctcccctttttagatcctataggataactttctcatgttgccatggcatttgtaaactgtcatggcactggtgggaatgtggcaatgaggatgaccagaggtcgctctggttgcaatcttggttttggtgggttttagccaccttctttactgcgtcctgttttatcagcaaggtcttcaagacctgtgtcttgtgccgacctcctctctcatcctatggcttagaatgcctaactgtctgagaatgcagcccagtaggtctcagctttattttacccaacccctattcaagatggagttgctctggttcaaatgcctctgacacaatgaccaaagactatattgaatcatgtatggtcagtagattgttagtttgtaaaagccctgaattttacatctttataattcccattcaactcagagctggctatattaagtgccatttttatagccaaatagttttatttttgttgcatatttaagggatttttcaaatgtttttctctattaaaatgcattgtagcttacctactttgcaatgtggaatggaattaatgctgaattagtagatagaaaatttgtgttctaggtcccaccccattacttcctaaatataactagggctaattcacttaactcaattttctcatctataaaatgggtacaatcatacttcatctttacctatgtctactattcagcatgcattcttagagtttttccatttaaattgtgttgtggtttttcttatttgtttgagacagggtttctcgttatgttgcccagtctagactcaaactcctgctctcaagtgatcctctcacctcagcctcccaagtagctgggactacagacacattccactgcatttaaatagattttaaaggccattaaataatttggaaaaaaataatttcaagcatagcattcctaacaagtaagctgctattagctgctccttacaggttgttgtaaagtttaaaagacagcgtgtacataaagacaatgtctagcacataataaattttgaataaatagaaagtaataggatagaggtagaattttctattgtcctgtttccctgatcccatttaagtaaatatttaattaattcttgtacattctccacaggcctttgcttatgaattcctgtcagtaagaaattatagcttaaggatgagcttgctgtcatttaaaaaaagaaagtatagccccgcacagtggctcacacctataatcccagctactcaggaggctgaggctggaggattgcttgagcccaagaggttgaggctgcagtgagccatgatcacatcactccactccagcctgagtgacagagcgagaccctatctcaaaaaagaaagaaattatgacagaagctaactaatcagatgttagggatattatagagagaatccctacctgtaaattgaaagttggccagatgacttctgtggttccttccaattctatgattttgctttaatacatatagtacctatctctcagggtttaactgagagctttaagggctgagatagtatatgggaaaaccatttgtaaacataaagtactatacaaatatgtggtattattatataagactagtaaactagtcaacagagattccctcagtaactgtaagaactatctgtggtggggcacggtggctcacacctgtaatcccagcactttgggaggcca[134 bp omitted]gaggcatgataatcacttgaacctgggaggcagaggttgcagtgagccgagattgcaccactgcactccagcctggggaacagagcgagactctgtctcaaaaaaaagaaaaaaaaaaaaaactatctgtattcattgaaaattaaaagatacacataatgtattgaggtgttttttgttttttgttttggtgaggcctagaatttattatattataatcgttgccattgtttgttatctatttatgtttgttttcttagctaagaggattgtagcacttttttatgtagcatacattctcctatttcttccattacatttactctgtgacagtttttcctaaggcaatgcccagatgtgttgtggttaaggttataattcagcatttctatcaaggagacatctttctgaaaactatttggaaatagacagtagctctctgcaatcaaattcactcagcttgatgccactactcttggtttaacttaagcagcacagaaccaattttatggtgaattcagaagagaagctattgctggaaaataaaatgactttgagcccttctatagtatttatctactgccaactatttcttctcctcattattagaatagtacatactttgtactgttgtgattcttctgtgtagaaaaaagttttataactcattttgttttttttagttttgtcatttttcatttactgaccagatcagatcttttcaaagtcaaactataattttattctttagttccctatggagtagcatttaaagaaaatcatggtaaattactctattcttagttggaattttattttacagctatgaataaaagcattttcctagatattttccatagaattcctgaaaatagtttctcagatctttctcagtattaaaagtcaggctgagattctcattttgtccctagttgctgtaattttgttacttcccccatcagcattcccatttcttttaatttttaaaattcttttggtttattttctgagtttaacagtggggaatccatttgactgtgctcacagcaggtagtaagtactatggtagacactggattggtttctttggatggttaaaagaataagagggtaattaagcttttctgaagctgccaactgtattggaggtttggtgtacatttaaggcttatttaaaaatagttccttcagaaactgaacatttaaccagtagaattcctaagggcatatcgtttttatcaggtagcgattacttagattactagaatttgtgtcaaatagatttcctctttcatataagactaagtctaatgctgtactatctcattctgacttgtaatgttaatttatgatctttagtagggtgctttttacctaccataaactcccaaatatagctttttaaaataatgtgtgctttaaaaatacatgcatcttgtaatcctagcactttgggaggctgaggctggtggattgcctgagctcaggagttccagaccagcctgggcaacacggtgaaaccccatctctactaaaatacaaaaaattcgccgggcatggtggcatgcacttgtagtcccagctactcgggaggctgaggcaggagaattgcttgaaccctggaggcagaggttgcagtgagccgagatcacaccactgcactccagcctcggtgacaaagggagactccgtctcaaaaaaaaaaaaaaaaaaaaaaaaagcttctaaaaaactgaatagaaacgtttattcagttacttttaaagatgcagaattagccaaagctttgcttcttgaactcaaaatctaaatctagataaaatgcagaaaagggattgcttttatgagctacagttatgaggtctaaaattttatctacataagctgggatgttgacatgtttaaaaccccaaacattctgtactgaaccataaatggaagcagagctatagtctccagagttgtaattttcccagtggtttgattcagagtactttgaaaaggtaatttaaatttaaatttgaaagggagaaatgcctaaaggttttatggctctcagaagataatggataggaatagtcattgtatgtgagagaaggaagaaaaccataagagaaatgtggcatttagaaacatgtactaaacctggtggaagaatagaaattgatagatggaaagaggtgatgtagggaaaatatacagtcattgaacttgagagttcttgaatagttaacattcagctttcattctattcatttaataaatatttactgagtaccttctgtgtgctttttggcaccgtggttttaagcagataagtgtcaatgacataactaattttaaactttctgttttgaaaccattttagatttacagcgagttgaaaagatagaggctgggcacggtggctcacacctgtaatcccagcactttgggaggccgagatgggaggatcacctgagatcgggagtttgagaccagcctgaccaacatggagaaaccctgtctctactaaaaacacaaaaaattagctgggcgtggtggtgcatgcctgtaattccagctacccaggaggctgaggcaggagaatcacttgaaccagggagggggaggttgcagtgagccgagatcacaccattgcactccagcctgaacgacaagaatgaaactctgtctcaaaagaaaaaaggaaaaaaaaagatagagagttctttctcccaggtgctacatgattgtggtacattactcaaaactaagaatttaccattggcactgacagttttaaaggacatatcttatctggcacttgctggcagaataaactatggggtcaggggagggcagggtagaagcagggagatcagttagtagttgatgacattaatccaggggaagcatagtaatgatggtttagactaggtgtttatctataaaagtggtaacaggtagtcggattttgaaaatagaaccaagaagatttgctgatggattggatttgggatgtgagataaacagaggaatcaaaatgactctaagatttttggaaaggagtcatttctaaaaatggaaaatgagttttagcactaaacttactgtccttccttccacaccaaccttactgcctttctctccacaactctttaaaagttttagttatttcattatctacacagacaatcctccaatgctcagatatctctgtttcttgacctcctcacctccagtgatcttgtcttccacctcaatttagtcacctgctcataagatcatcctctaggctatgtcgttactaataactaaaccttcattttaagcattctactctcctcccacaactcctgtctttccagccctctccctgtagtatatggacttcaacaattttaactccaacaggaccttggatccattttctctatgatcttcactaccctccttccttggcccattattaaaatgaggcaaatggaaaactagagttactatttgttgaaataaggaagtttataggagaaatgggtttgatgaaaaggaggttgagaattaggattttgttttaggacaaataagtttaataagtttgaaatgagcattagatatccaagagcaggtacttgaatataagagcctagtgttcgaatgagaggtttggaccagaaacatacaatgggagtcatcagcatatagataatacataaagatatgagacatgataaaatctattaaatggatagagatagagaagaggtcaaggactgaaccctgggcattaccatttttagagatcaggaaaagagaaaccagtgaacaagatcaaaagaagcatctaatgaagtagaaagagaaccaagagaagtggtgacctaaaagtgaaacaaaaaggtttcaaggtggagaaaaatgatcatttctgtcatatactgctgatagtccaaataaaatgaagatgagaattgacagttggatttggcaacatggaagccattgtgactttaataagagcagtttcagaaaagcactgagaattagagcctgaatggaatgagtttaagagacaatgggaataaagaaggtagagacagcaagtacagattgctctttcatgtttgattgtaaagggcagcagagaaatgggactttgactgaggaggtgaaatgttggtcaagaaacctgtattttaacattggaaacattgtatgctgatggaaatgactagtagagaggggtaattgataatgtaagagaaagacagttacaggttggtgagaggggatagaatccagtagatgtggctaggtgcagtggctcatgtctgtagtcctagcactttgggaggctgaggtgggtggatcacttgaccccaggaatttgagaccaggctaggcagcatagtgagactccatctctacaaacaaacaaacaaacaaacaaaaaacaacatctgggtgcctgtgaggtaggaggatcgcttgaacctgcctggttgaggctgcagtgagccgtgatcgtgccactgcactccaggcttgggtgacagagtgagactctatctcaaaaaaaaaaaaaaaaaattcagtgaatcagtagaagagatggccttagataggattatggaca[132 bp omitted]taaaaccccatctctactaaaaataaaaaattagccgggtgtggtggcacgcacctgtaatcccagctactcgggaggctgaggcaggagaattgcttgaacccgggaggcagaggttgcagtgagccgagattgcaccactgcactccagcctgggcaacagagcgagactccatctcaaaaagaaaaaaaaaagaaaaaaaaaaagtgtatgggtacagatgcacatattttagtatatatttagtatgatgagagcttacgtgagttataatttctatttttttcaatgaggagagggagggagaagagttgatttttttttttttaatatagtaaggtaagtaacactaaaggctcatttaacgttagtagtaatgaattaaaggaagccaagtcattatgtttgagttttactttggtcacattcagctgtctgaatgctgcagtggcacgatcatagctcactgcaacctcgaactcctgggctcaagggatcctcccacctcagcctcccatatagctaggattacaggtgtgtgccaccacatctggctaatttttgtatttttttgtagagatgggatattgctatgttgctgagactggtcttgaactcctggcttcaagcaatcctcctacttcagtctcctaaagtgttgggattgcagatgtgagccattgagcccagcctcttaccttattctttttaatggctgcattgtattccattgtatttcacctgtgccctattgagaatttttttttattattatttctaggttttcactgtagtgaacatctttaaatatatgtcttgaagtacttttttttttttttttgagatggagtctcactctgttgcccaggctggagtgcagtggtgcgatctcggctcactgcaacctctgcctcccgggttcaagtgattatcctgcctcagcctcctgagtagctaggactacaggtgcataccaccacactcagctaatttttgtatttttagaagagacggggtttcaccatattggccaagatggtcttgatctcctgacctagtgattgaagtacttttacagctatataaatagaataaatttctaatgttaggttgaaataaatgtgaattttgaaaaatattagggccaggtgtgatagcttatgcttgtaattccaagactttgggatgccaagacagctggatcacttgaggcctggagtttgagaccagcctggccaacatggcaaaacccatctctactaaaaatacaaaaattagctgggcatggtggtgcacacctgtaggcccagctactcatgaggctgagatggaaggatcacttgagcccaggaggcagaggttgcagtgagccgagattgcaccactatactcctatctgggtgacagagtgagaccctatctcaaaaaaaaaaaaaaaaaagaaagaaagaaaagaaaatattaggtggataaatgatgtggtggcaccacttattatcccaaagctttgggaggcagaagctggaggatcacttgaggccaggagtttgagaccaacctagg[137 bp omitted]atggtgaaaccccgtctctactaaaaataaaaaattagccaggtgtggtggcatgtgcctcccgagtaccagctactcgggaggttgaggcaggagaatcgcttgaacctgggaggcggaggttgcagtgagctgagatcgcactactgcactccagcctgggtgacagagtaagacttcgtctcaaaaaaaaaaaaaaaaaagtcatttggacatggtggcttgcaccataatcccagctactcaggaggctgaggagggaggattgtttgagcccaggaattcgaggttgcagtgagc[132 bp omitted]ctgcaacctccacctcctgggttcaagcaattctcttgcctcagcctcccaagtagctgggattacaggtgtgcaccaccatgcctggctaatttttgtattttttagtagagacagggtttcgtcatgttggccaggctgatctcgaactcctgacctcaagtgatctgcctgcctcggcctcccaaagtgctggcattacaggtgtgagccactgtgcctggccgagaccccatcttttaaaaaaagaaaaaaaggaaggaaggaagggagggagggagggaggaacaaagggaaggagggagggaagaatggaaggaaaggtggaaggaaaaattaggtataccaaatttttctttaaaattatttatttgtctgagtgctgtggctctacagaaaattaaaaatttagctgggtgtggtggcacatgcctgtagctccagctgctcaagaggctgaggtgagaggattgcttgagcccaggagttcaaggttacagtcagctatgatcacaccactgcactctaacctgggcaacagagtttagtccaatagcatgagtttctttttctttttcttttttactttaagtttcgggatacaagtgcagaacatgtaggtttgttacataggcatacatgtgctgtggtggtttgctgcacctatcaacccctcatctaggttttaagccccacatgcattagctatttttcctaatgctttccttccccttgccccccaccccccaactggccccggtgtgtgctattcccctccctgtgtccatgtgttctccttgttcaactcccacttatgagtgagaacatgcagtatttggttttctgttactgtgttagtttgctgaggatgatggtgtccagcttcatccatgtccctgcaaagaacatgatctcattcctttttatggttgcatagtattccatggtgtatatgtaccacattttcttcatttagtctatcattttggggcatttgggttggttccatgtctttgctattgtaaatagtgccacaataaacatatgtgtgcatgtgtctttataatagaattatttatattcctttgggtatatacccaataatggaattgctgggtcaaatggtatttctggttctagatccttgaggaatcgctacactgtcctccacaatgggtgaactaatttacactcccaccaacagtgtaaaagcattcctatttctccacagccttgccagcatctattgtttcttgactttttaataattgccattctgactggtgtgagatggtatctcattgtggtttttttttgcgtttctctaatcattagtgatattgagcccttttttcataccttttttggccgcataaatgtcttcctttgagaagtgtttgttcatatcctttgcccaatttttgaaggggctgtttttttatttcttttttgtttgtttgtttttgagagggagtctcgctctgtcacccaggctggagtgcagtgctgtgatctcggctcactgcaaggtccgcctcctgggttcatgccattctcctgcctcagcctcccgagtagctgggactacaggcgcctaccac[131 bp omitted]ctgtttttttcttgtaaatttgtttaagttctttgttgattctggatattggacctttgtcagatgggtacattgcaaaaattttctcccgttctgtaggtatagcatgggtttcagagttttgagggagaaaggagggacactgatctgtaggtggcaataaggagcaagtccctaaaaaaatacatatatataaatgatttcattaacttacattctcatcaacagtgtatggatgtcctagtttctctatactgttcctcctcccctcctccaactgggaattgtgtgttaatgttaagtggtttgtgttaagctaaattgcaaagtattggctgggtgcgatggctcatgcctgtaatcccagcactttgggaggctgagatgggcggatcacttgaggtcaagtgtttgagaccagcctggccaacgtggtgaaaccctgtctctactaaaaatacaaaaattagctgggcgtggtggcacgtgcctgtagtcccagctactcgggaggctgaggcaggagaatccaggaggtggagtctgcagtaagccgaggttgcaccattgcactctagcctgggtgacagagtgagactcttgtctaaattaaaaaaaaaaaaaaaggcaaagtattctaattggttgattggttgtctctgatgaatagcactgaaagaggaaggaagggtactattgcttttcattataactccctttatattttttaatttttaattatgtgctggttatatgaatcatttaaaatatgtgtgtgcgtgtgtgtgtatgtgttatagtgtgtatatgtaaagaagcatagtcaaatatgatacccttagcatccatagccaattaattgtgctgtgctgccagattattttccatgtgtgtgttcatttcctaataaactttgccatttctatttaattgaagagtagcttgaaattttaagagaagctgatttttttttaaattactatttgtatggcatttttggaaactggattgtcttcagtgtaatataacaaaaccaattagctattggggctaatataaaactgcagcagtatctacaacttcagatttaagatgtttgcattaattaaagcaacctaatttttctaactgaatggactataatatgtaaatgttatataactcaaatatataaaataaatgtgcacctaaaaacaagttcttatagcatgaaaattaaactcttgattttaaaaatattgactaacattgaattcagactttgtgttattttaactcacaatttatttttttaaatctgatagaaatttgtcagaacatatggacttgtaatatctttgctttaaaatatattcatttttatactttagagatatat[134 bp omitted]tgcctcagcctcccgagtagctggggctgcaggtgtctgccaccatgcccggctaattttttttgtattttttttagtagagaggggatttcaccgtgtcagtcaggatggtctccatctcctgcctcatgatctgcccgccttggcctcccaaagtgctgggattacaggcatgagccaccgcacccagccgacttttaaactttttaactagcgatataatattttcagtcttttggccttctgcagctacctttccaaaaaaattgtggaatcttagttaagtgtttcggttgcagtttcctttactgttaccagttacccaaaatagatatatcaatcaggggcctttgttactgtagcagtgttacctcaaataaattcatttaaggccaggggtgttggctcactcctgtaatcccagtattttgggaagctgaggcaggtggattgcttgagcccagttcaagaccagcttgggcaacaaagtgagaacctgtctccacaaaacattttaaaaattaaaaaattagccaggcggccgggcccggtggctcatgcctgtaatcccagcactttgggaggctgaggcaggcggatcatctgaggtcaggagttcgagaccagcctggccaagatggtgaaaccctctctctgttaaaacatacaaaaatgagctgggcgtgatggtgggtgcctgtagtcccagctactcaggaggttgaggcaggaaaatcacttgaacctgggaggcagaggttgcagcgagccaggatcacaccactgcactccagcctgggcaacagagcaagactccatctcaattaaaaaaaaaaaaattaaccaggcatggtggtgcttaccatggtctgtgatctcagctacacgagaggctgaggcaggaggatcacttgagcctacaaggttgagactgcagtgagctgtgtttgcaccactgcactctaggatgggtgacagagcaagaccctgtttccaaaagaaaaaaagaagattcgctttatctggcagatacaaccagaaacaaaaaagcctctcactatggaaaaatgtactaatctagcattcttatactattgtcaggactacttgatatttgaaagaaattattatatctattatatattatattactattatgttatctgaactcttagagaaggtatttggttactaactaaaatcacaacaagatactattatacacccatcagaattgctaaaattaaaaagactgacaccaccaaatactggtgaagatgtggaacaaccaaaactctatacattgtcaatgggcttgtaaaaaggatataaccactttggaaaaagggctggctgttttgtgtaaaactaaacatgtaccttccctgtgacccagcaatttcatttcttggtatttgcccaagaaaaatgaaaacatatatctacgaaattactcacacacgaatttttttttttttttttgagacagagttttgctcttgttgcccgggctggagtacagtgacgcgatctcagctcactgcaaccttcgcctcccgggttcaagtgattctcctgcctcagcctcctgagtagctgggattaaaggcgcccaccaccacgcccggctaatattttgtatttttagtaga[131 bp omitted]tatagctttattcatcatggccccaaagtggatacagcccacgtattcatcaatagaagaataaataaactgcagtatgttaataaactggaaaactaatcaacaataaaaagtaattattattgatatacaataatatgatgaatctcaaaaatattttgctgagtaaaagaagccttacataaaagaaaacaggctatatgaatccattcatacgaagttcaagaagagacacattaatctatgatgaaaaaatgagaacagtaggagattgagagtgaggattgactggaaaggaggaggatggaactttctggagtaattatgatgtcctatatcttggtagggttttgagttacataggtaaatgcatttgccaaaattcaatgcatgtatatagaatatgtgttttattatatgtaaattttactaaagcctgtacaaaattttgaattctagttaacaatatgcatatttgcagggggaaatgtactgatatctgtagggtgctttaatatgcatgagaaataagatgcactgatggattgatcaatagatagcaaaatattaatggtagaatctaagtagtgggtatatgaatgtttactgtaaaatcattttcatttttctgtacatttgaacatttgtataatagaatactgagaagtagaaaaaaagcattcgatactctcagaaacaatttttttccttatgtattccatgaagagaagcagagtcagcaataacccctgaaagttaagttgcttgcttattatgtttctggctggatataagttttcacagaaccaatagagatacaactgggtttctttatgttatcatgttattttgttttacatacatatttgggaagttagcttgtttattctcaactcatcatttaaaattctgttagctttggaaggtcgtaaaaatgagatacactgtcattattttcaatatcagaaattcttcctgctatctctgttttgaaaatttacttgttttgtttacggtcatactaccctgaacgtgcctgatctcgcctgaaaatttacttgttctatcacaatttataagaatcaagtatctgggctgggcgcggtggctcatgtctgtaatcctagcactttgggaggctgaggcaagtggatcacttaagtccaggagttcaagaccagcctgggcaacatgggaaaaccccacctctacaataaattaaatgtatatacacacacacacacacacacacacacacacacacagacacacacacacatatacatacaaaaaattagctggatgtggttgcacacgcctgtagtcctagctactctggaggctgaggcaggaggatcacttgagcccaggaggtcaagtctgtagtgatctgtaattgtaccactgctctccatattgggagacagagtgagaccctgtctcaaaaaaagaaaagaaaaactgaataataaaaaacagatctgatgaaagttgtaataaaatacattgccgtgaataacataaaaacttaatcttataaacactttgattaaactagaacacaaagtagagataggtcaaggaagatttggtgcagaagataaagccttaggtaacagagcttaggaaataagtaaacgaaaaaaattgtcagtgaaataatggacatattggaagtgcaaaaggagaatacacacttctggaaaacatagtaagggacatgggaagctagagaaaaaaatgagcaaaatgaaatggaaattaaccaagtgtttaaaaggaatagagagccaatgtaagatgtagaacatggataaagtagaataattgtctctgaagaataaagctcaatagaaaataatatttaaagattttttaaaggaaactattcagaaacaaatgcagacttgaggccaggtgtggtggcttaagcctgtaatcccagcactttgggaggctgaggtgggtggatcacctgaggtcaggagttcaggaccagcctggccaacatagtgaaaccccatctctactaaaaatacaaaaattaaaaaaaaaaaaaaaaaaaagaaagaaagaaagaaaaaagccgggcgcggtggctcacatctgtaatcccagcactttaggaggccaagacgggcggatcacctgaggtcgggagttcgagaccagcctgaccaacatggagaaaccccatctctactaaaaatacaaaattaaccaggcatggtggtgcatgcctgtaatcccagctacttgggaggatgaggcaggagaatcgcttgaacccgggaggcggaggttgcggtgagctgagatcatgccattgcactccaacctgagcgacaagagtgaaactacatcacaaaaaaaggaaggaaggaagggagggagggagggagagaaggagggaggaagggaggaaggaaaggaggaaggaagaaaggaagtcaggtagacttgaatctatagattgagagagtacatcatgagccagggaaaatgtacatagaacaattataataaggcacaacctagtcatgttattggactccaaaaattaaagaatgattccagaaaaaaagaaaaaaacatatgagagggagaaagatttggacttacttcagaattctcctcagtatatttcagtgccagaagactgtaggctttatagactttatctatagtcctcaagaaaataatgtgtgatccaaggttttatatctagcttacctgttatttaggtaaaaaggcaacagatgtttttgaacattcaagaactcagaaaatataatttccctgatgcctgtactgtgcccagccagccaaacaagtgataaagaaaatgtcacaaaagaccttatgtgagcatgcaatccataagattcatgtggggcttactattccagaagagaatttacatgttataaactctgacagtgtaggtattaaatgaccccaaagaattgggagggctgggtgtggtagctcatgcctgtaatttcagcattttgggaggccacagcaggaagattacttgaggccagtagtttgagaccagcctgggcaacaaagcaagaccctgtcttttttcagaaataaataaaaataaaggattggaagg[133 bp omitted]ggccaacatagtgaaacctcgtctctactaaaaatacaaaaattagccggggatggtggtgcacacctgtaatcccagctactcaggaggctgaggcaggagaatcacttgaactcgggaggtggaggttgcagtgagccaagatcacatcactgcactccagcctaggcaacagagcaagacgctgtctcaaaaacaaacaaaccactagcaggaggatgtactccagtaaaatctaagaactaatttattaacataaattataaaaacaaacaaacaaacaaacatgggatctgggaacaggtgatccagcacagaagggctccgtaaggaagttccaggatatcatttttataccaggcctaggccagggagttttctagaaaaaaataaggactggtttatatgagcatatgaaaaatattattattgaatggcatgccacgatgttggagcttttggaaaaagaatactgataggtatgttggaaacaaagcaaatgaaaaaaataaagcagttaacaactccaggaaaaacaaaatacagtcaggcaccccacaacaacattttagtcaataacaggccatatatacaatggtagtcccataaaattgtaatagagctgccctgctctatatagatgtaccgtttttatgttataccatatttttactgtactttttctatgtttagttacacaaatacttacactgtgttaaaactgcctacagtgctcagtacagtaacacactgtgcactattgtctctaggaacaataggctgtaccctatagcctacgtgtgtagtagactataccatctgggtttatatgagtatgctctatgatgtttgcacaatgacaacatcgcctaatgatgctcttctcagaacgtatccccattaagtgacacatgactgtaattgtgcaagaaaaggagttcttgtataattagtctgctgttcagcagttcacactatttgtatggctataataatattttaaaactcactgatttaaccaaatattgggagaattgagggagaggagagttgtgtatgtgagaacaattactaaaacttcatgttggtgaaatgatactgttaatattgataaagcaagaaatcggaaacaactaagatgccttctaccatggggggaagataataaatctgatatttaatattgataaattaagaaatatcaatataaacattttatttagaaagatggaaacaggctgggtgtagtggatcacacctgtaatcccagcattttgggaggccaaggtgggtggatcacctgagatcaggagttggagaccagcctggccaacatggtgaaactccatctctactaacaatacaaaaattagctgggcatggtggcgggcgccagtaatcctagctactcaggaggctgaggcaggagaatcgcttgaacctggaaagtggaggtttcagtgagccgagatcgcaccattgcactccagcctggaagacgagtgaaaccctatctcaaaagaaaaaaaaaaaaaaaggctgggcgcagtggctcacgcctgtaatcccaatgctttgggaggccaaggcgggtggatcatgaggtcaggagttcaagaccagcctggccaagatgctgaaactccatctctagtaaatatacaaaaattagctggatgtggcggcacgcgcctgtaatcccagctacttcggaggctgacgcaggagaatcaagtgcaaccagaggttgcagtgagccaagatcaagccactgcactccagcctgggcaacagagcaagacttcgtatcaaaaaaaaaaaaaaaaaaaaaagagagatggaaacagggagaatgactagaagagttgaagttgatagcctctgcagcttagagaagaatggggaagcgtctttcattataagtcttgtaatagtacaatttgactttttaaaggaggtgactacaatattttgacaaaaataaaaataatttaaccaataagggattatttctctgtgtgtagtgtgcacaaaaagttatgtaaagctatttactgaagcattatttatttggtattaattacaaattatatcctgtaggtaacaactcaagattatgttacatggtacactgttttgtaaatatatttattttctactcttaaggaacattcattctaaggagttagggaatggcttaaacatatataaatcagaaaaatagtagtttacccattcagcaaatatgtattgagcactgtgtgccaggcactgatctgggcactagacatcaaaaagagacaaaagcatctgcagtctagtggaggagcaatggagacataaacagtaaacataataaaaatggtgtggccgggcacaatggctcagcctataatcccagcacttttggtggccaaggcgggtggatcgcttgaggtcaggagtttgagaccagcctggccaacatggtgaaaccccatgtctactaaaaatacaaaaattagctgggcatggtggtgggcacctgtaatcccagctactcaggaggctgaggcaggaga[229 bp omitted]cagtgaaaccccgtctctactaaaaatgcaaaaattagctgggcgcagtggcgggtgcctgtaatcccagctactcaggaggctgaggcaggagaatcgcttgaacccgagagacggaggttgcagtgagctgagataatgccacgcactccagcctgggcgacagaactagactccatttcaaaaaaaaaaaaaatggctaggctgtattagaagttgataatgtctatgcaaaaagaaaaagacatacggcataagaggattcggaagtgcaaggagaagaggaggaactatcaaaggagactgagaagacagaaccctgggagtatataggagaatgtgacgttacagaagcttagagaataaagatcatgtcaaggtagacgacatgatcagtagccaaatgctcctgaatgaagtggacctgagaatagactattggatttagcaaaaggaaggtcacttatgtgatgttgacaagagctgtttcagtaaagatgtgctatctaatttcttctcgtcatggagaaaggatgacaagaaagatagttaccactaagccctcttatttttgtgatcttatagcagtagtcatagtttgatctttggtaaatttgtaacatctagattgctattcacagaagacttaggataactttggttttgcttggatgtgaacctgatcagtgtgagcaaatggttggtaagattatactgttagcagcagtagggaatgagatttcttttttttttaaattttattattattatactttaagttttagggtacatgtgcacaatgtgcaggttagttacatatgtatacatgtgccatgctggtgtgctgcacccattaactcgtcatttagcattaggtatatctcctaatgctatctctcccccctcccgccaccccacaacagtcctcagagtgtgatgttccctgggaatgagatttctgttgtgaaccccaaacccagaactgcaggaactagtcctttggtagattacattatttagttgtagaaaaactaatgaagagaatcggtggtgtgtgggcattgcaatcagttgactccacgtggcattcctagaggttgctatagaaagaaagaaaatagcttaaattcagccccaattttaattccatatagtccactaagaaaaagaatactaagtcaggtggagaacttgccttcattatttttagcttaatgtgttattctagatttagaatacctatgattaactgggatgaggggatgatcagaaattcaatatttaactgctgtcatcctagcaagggcatactgagtagatagcatcatcataatatgtgggctgagatgaggctgctccagacgagtctctctccaagttaattgatggaaacttcccaccttcaagaatttttattaccttagcaatgctatgccaagactgttgaaacacagctgtgggtgctgtgcagacgcccacattgccaatgtcaggaaggatgtacttttaaacctctaatttatctaataatgtcgttagtgatttgtgtaggtttggcattgtgatgaaaatgcttcctggcttggtttataacaagaattcagtttgcagtcttaaaatgtatattgtcttaatatgcatgtggaatatactaacaagtcaatacaaaaagatctgaataaaatactatcctgtccatctaaaggaacttattatcaacccatggtatttgaaaatgaatgcaaattaaatgtttttattcagtaataatctatttatctgttgtggttcctgctttataacaagatggcaatattcagtgctgaaagagagccagctttcatattcaatccaatctgactcctttcctattctctaatggaaaatacgaattgattggattga[144 bp omitted]taataaaaatacaaaaaaaaaaaataaaataagctcttgtaaataaatattttaaaagaggtaggaaacagtactttcttgtttcaaatataaaattttatagtaacaatattgttttatatgacatttatcatgtaggcctgtctcttttttttttttttttttgagatggagtctcactctgttgcccaggctggagtgcagtggtgccatctcggctcactgcaacctccacctccccagttcaagcgattctcctgcctc[314 bp omitted]tgaaaccccgtctctactaatagtaaactacaaaaattagctgggcatggtggcaggcacctctaatcccagctactcaggaggctgaggcaggagaattgcttgaacccgggaggtggaggttacagtgagccaaaatggtgccactgcgctccagcctgggcaacagagtgagactccatctcaaaaaaaaaaaaaaaagaaagaaagaaaagaaagaaagaaaacaaataatacaaaatgtgaaggattctttcctaactaatggattcactgcaaggattgattgcatttatcaaaataaatatacatttaatgtttcagaatacacccacagcataaagcagaatattcctaattatttatagaaggaatatatagcatttgtttctaccccactggactatgtgaaaacctttggatctgaagtgtgtttacacttttaagctgcctttgtcccatctttgaaattaaaaaaccttatttggaatagaattatagaagtagaattttaggcctagaattgactttagagttattttattctaacttaattttctagttgaggaaattgaaatccagggactttaagcaccttttctaaggttacccagctataactagaacccacctttctaactccttatatttctgctctaatttcttgtctccaacaagttagtcaaatagtaattaaatggtaagttggcagaagttttaggtctctctcgtgtgtgtgtaactatgtattttcaggctccaaagtcaatagtggtctgtaattattcttcatatatatatgtttttatctttgtcattacatggagaaatcagtgtttaaattataagttaaagtgatttctgagtatctgaggtatctatgaatacataaataatagtctttaatatctacatataggtaacaaggacccatatataattaagtcctgcaagcactataggtgaaggaaatgctaaggattctcctatgactgggccccattatgaaatttaaagaaatcagtacttatctagagcataagaaatgaacatgctcagtactcataggctgtctatgctgatacactaattctttttttttttttttttttttgaggagtttcgctcttgttgcctaggctggagtgcaatggcgcgatcttgactcactgcaacctccacctcctggattcaagcgattcttctgcctcagccgccagagtagctgggattacaagtgcccaccaccacgcccagctaattttttgtatttagtaaagagggggtttcaccatgttggtcaggctggtctcgaactccggacctcaggtaatccacccacctcagcctcccaaagtgctgggattacaggtgtgcaccaccacgcctggcccactaattccgataatgacttggatagttcccataatgatttaacatctgtctcctgcttcaaccctgtccccagacactaaaacaaactaaaataatttgtgtaagtaaagtactgacctattgaaggttattagaatgcagttacatttttataattcaaaatcttccaccaagcatgttttcagctgtggctatttttgaaatagaattgaggaagcaagataaatatttggaggataaagatgatgctagccaatatgagctgcaggaaagaacagtcagaacattcatgactataagttttgtgggggttttatgtgtgtttgtagaacacttactgttagcttaaagcaagcaagaccccatgctttgtttacaaagctcaatttatgaagtttaagtagagcctggatttttgttttacaattcataacatcaagaaagtcagtatacacagaaattcatatatgtattcatgaacataaatagccttaatgaagtggaacgtgttacttatgtgactaaacttaaaaattaaaactaaatgggcccctaattaatgattttcaacattgtttaaaaaatatttatgtatataatttttatatgccttagacataaaataggcaaagattttatttccgtctatgaatatataaaattagtactttgatacctaaaacaaacaagaaaacatcaaattggtatgtatggaaaaactttccttttgttctcaggatgtgaattgcttgaagataaaaatggaaagcacttcaaaatatctgtttatatacataaaaagaaaagcattattcttggactatatttgagagtcctaacaagattaatttgacttggacacagagtcccccaaaatgatactgcaaatattaaaggatttctaatcatattgcagttcagcagtgttctcaacacaatgacatttataaacctagtactccaaactgctatgagtattggctctcttttgatatttgctatgcttattacatttgccgaactttaaaactttctgtatcaggatctttcaagtattttaagagaaatgatgaaagaaagcagcttgctatgttattatcatgttagtcactcctagtgattctcttcaaatgacaagcattagtgataagcttttatttgaggtgtatcaaatattctctgatgtgactgctctaaaatatatttgcaattctgatttttcagaaataatcacttccaactcaaagtcaaaaccataagaagttattcatgctaagtgttacagctttctgacatgtaggaataactgatgtgggtgaagcatctagcttaatgttttatatctagctattagtcagctaatcctcctccctacttcactgaaaatattttcattctgtctgacaaaaggtaaaaaaattatattaactgtgactaaaaatgtattgcagatgacacattaatgagactaatggttcttgccttattctctaaagttttcatttcttacatttgttgaacctacatccagatagtttaataattacacagaagatatccttttcttttggaactctaatggaacaagattacaataaaggttttcagatcatttttgttttttgggtttttttttgagacagcctcactccattaccccacccaggctggagtgcagtggtgtgatcgggactcactgcaacctgcacctcccaggttcaagcaattctcatgcttcagcctcccacgtagctggggttacaggtgtatgccaccatgcgtggctaatttttgtatttttagtagagacagggttttgccacattggccaggctggtctcaaactcctgacctcaggtgatccacccacctcagcctcccaaagtgttgggattacaggcgtgtgccaccacacccggcccagatcatttttaatgtaaatttaaaaaacaacccagtaaattccataactatatactaaaaattcatataggtaaaacatttggaatgtgtccagttaatcagagtaagacatgacagaaaggtaaagataagcgatttttacagagattaggtctgtgaagaaacattttgactcatcaaaattcagttaatttccatagcatggaaggagacatggtaacattgtttataaagcatttggattttaaagggatcccatcaatttatttaataattgttaaagggtagtagcttttaaatttttttcatcataattcagtatatacttacctacatatatatgtgaaacaatgctttacct[136 bp omitted]tggtgaaaccccatctctactaaaaatacaaaaattagctgggtgtgttggtgtgcacctgtagtcccagctactcgggaggctgaggcaggagaattgcttgaacctgggaggcagaggttgcagtgagccgagatcatgtcactgcactccagcctggtgacagagcaagactccatctcaa[135 bp omitted]accccatctctactaaaaatacaaaaattagctgggcgtggtggcaggcacctgtaatcccagctactcgggggagtgaggcaggagaatcgcttgaacctgggaggtggaggttgcagtgagccaagatcgcgccattgcactccagcctgggggacaagaccgagacttcgtctcaaaaaaaaaaaaaaaaaatgctggtcataattcatacattaatttcattacccactaatggatcataaactgcaatttgaaaaatactgatgaataatagctgggtgcagtggctcacacctgtaatcccagtactttgggaggctgaggcgggaagatcgcttgagagtaggagttcgagactagcctgggcaacatagtgagactatgtctctaaaaaacaaaaaacggggcatgggtcatggtggcttgcacctgtagtcgtagctccacaggaggctgaggtgggaggattgcttgagcccaggagtttgaggctgcagtgaggtatgactgcatcactacactccagtctgggcaacacagcaaggctctgtctcaaaaaagaaaaagaaatattgatgaataataaaataattttctaattttttttccttgaagacatagaatgtaagcattgccattttatatgttcctgaaccactcacttatttggactcatctagaccttgttatcaaaaattgcatcagctcacaaatcttgtacacaagcatcctgctctcagacgacaacattctgccctagattttgtgcccaagtactcccacctacaattctttaattacatttagaccacactgatttacaactcaagtctgttctttaagatttgtgggggtagggggagggatagcattgggagatatacctaatgctagatgacaagttagtgggtgcagcgcatcagcatggcacatgtatacatatgtaactaacctgcacattgtgcacatgtaccctaaaacttaaagtataataataaaaaaaaagaaaaaaaaaagatttgagtatcttaaaaagatactcaattctgcctgatgcagtggctctctgtaatcccagttactcaggaggttgaggtgggaggatcccttgagcccaggagttcaaggctgcagtgagctatgattgtgccactgcactccagcctggaaaacagagtaacactctgtctctaaaaacaagtaaaaattttttttaaagatagcaatctctagccaaagatgattgaataaaataaaaagtgaattaaaaaaaaaagataacaaatctgcagggggcggaaattgcagtgagccaagatcgtgccactgtgctccagcctgggtgatagagtgagaccctatctcaaaaaataaaaattccaaatctccatttctcttcttcgctttatagtactaccttgcaaaaccccaaatccttcttgtcagagacatttctctaaaacttaaataaaaaacaaaacaacaaaaaaaacacacaaataaaacaaaaaccaaaaatgaacctcgaataaaccgccaatcttgtgacacttgatgaactaaatggttctttctacctacgcatgtgccaacatagatgaaaaagtcatgccatcagaaaaactggtttcatttaaaaattatctcaaacttcccacagtctcttagcactgtgtgacagtcctactactctctgatatgacgatttcatatctgctctgacttcatccctcctccttcctttctaccctcatgacctagtttgtgatttaacctagtggctctcaaaatgtggttcccagacccgcagcatgagttcatatttaacttgttaaatatgaagattcacaggcctcacatcaggcttattgagtcagaaactctgtggatggggcccagcaatctgtgtgctaagaagccctgcaggtgattctgatgcgtgagaaagttttgaaaatgaatcttgcctcatacttcattgagaagcccttctttagaatgtaagctctaagagggcaggggttttttcttttttgtttatatataccctgagcactagaacagtgcctggtacatagtaggcctcaataaatatttgttgtctcaaatcattaaatgggaatacccgtcgtttcctactaacatctaaaaacatacctgcatctgtactgattttcttctttttccaactaaggaaatgtgcctcatcctacagtcagattctacaccattctaaaacaacaacagactttccctttcccctatcccctatcagttactgccccatatctctgtttcccctctgtgccaaacctccctgccccctactcagtaattaacccattctagcctgattttcacttccactattcagtagttcttgacaaagtcagtagtttttttattatctttattgagatataattcgcataatataaaatttacccatttaaagtttacaactaactgatcacaaccagtcataggtttctttgttccttctctactcccactgcttcacatgacttgcctttttaaaaaagtgtacaattcaaggattttaatacagtcacagttgttcaaccgtcaccctaagttccagaaaattttcatcaccccagaaagaaaccccctacctattagcagtcactcctcattcccaccacccctccagccctaagctaccactactctctgcttctataaatttcctattctgggcttttcatataattattattatagaattataaattctacaataagtggtctttgtgactggcttctgttgctatccataatgttttcaaggttcatccacactgtagcatgtataagtgcttcattcttttttatggctaatattccagtgtatgaatatattgcattttatttatccatcaagtgatggacacttggttgtttttactatttggcgattataaacaatgctgctgtgcacattaatgtatgagttttttgtgaatatatgtttttatttctcatgcatgtatacctaggagtggaattgctgggctggccatatggtaactttatgtttaaaatgttaaggaagtgccaaagcagctgtaccactttacatctccactaggaatgtatgagagttccatttatccatatagttgccaacacctgttattactaattgtcttttttgttatagctattttattatagctatcctagtggatgtgaaatggtttctcattgtggttttgattagcatttccctaatgactaatgatgttaaaaggggaagaaaaaaacctgtttttctgtacagtcacacacttctttttttttttttttcgagactgagtctcactctgtcatacagactggagtgcagtggcatgatctctgcttactgcaacctccacctcctgggttcaagcgattctcctgcctcagcctcccgagtagctgggattacaggcatgccaccacactcagctaacttatgtatttttagtagagacggggtttcatcatgttggccaggctggtctcgaactcctgacctcaggtgatcgtcccgccttggcctcccaaagtgttgggattacaggcgtgagccaccttgcccagcctcacacacttctgacactaaaagtgtgtggggttttcccaccaaccaattctccatttctccctggacatcaattaggtgtcttacaatttaactcaattctgacactaattgcctggagttacaacagatcccacaggataacgggctcagtcctgcaagatgccccacctcagatgccagttaaaagtctggacctcccaaacttctgaccaactggttataaatcaaggtttcctacaaccttctccgaagttaaataatttgctataatgtcttacaaaattcagggaaacattcacttatgtttactggtttgtgaaaggatattataaaggatataaatgaacagccagataaagagagatatacagggtgaggtcctgaaggggaagggtctcaaacataataggttctgttggaggtggggtatgccacccttctagcacatagttatgttcatcaaaccagaagctcccaaaatcccatcttttaaggatttgcatggaggcttcatcacgtaggcatgttcaaataattattaagtcaatctcccatctctctcccttccctagaaaatgggaatagggttgaatattccaggcctcttattatgggttgatctttctgatgcccagttgccatcctgaagctatccagtagcccaccaagaactgcttcataagaccaaaaggcactcatagactatacaggaaattccaagggatttagaagctctatgtcagaaaccaggttcaaagactaaatattagaagatgcttccagtaccccgtcactcaggaaataaaaagggttttaggggctctgtgtcaggaaccaaggcggaggacaaatatttatttccaattatgtcacagatgttgcacatcttttcatgtgcttattgcccatttgtatatcttctttggaaaaaagcctttgggttgtctttttattattgaaatataaggattcgttacatatttgggataccagtctcattagatatatgatttgcaattttttgttttgttttgagacagggtctctctgtctctcgggctggaatataacgatgattatggctcactgcagccttggactctgggcttaaagcgatcttcctgcctcagcctcccaattagctgggactacaggtgtgcccaccatacccagctattttgttgttgtttgttttgagacagggtcttgttaagttgcccaggctgatctcaaactcctggccccaaccttacccccttgcaaagtaccaaaattacagacataagccactatgcctggcagatttgcaaatattttctaccagtctatgggttgtcttttcactttactgatttgtgatacaaaagttttaaattttgatgtagtccaatttaatattttttttcttttctgcttgtgcttttggtgtcagagctaagaaaaccattgcctaatccaaggtcatgaagatttactcttttaggagttttcttttaggagttttatgagttttagctttacatttaggtctgtgatgcatttggcattaatttttgtatatggtgtaaggaaggggtccaacttgattattttgcatgtggatatccaatttttccagcaccatttgaccattttgttaaacagaaagttattttcctttttcctgttttttttttttttttttttttttttttagacagtcttgctctgttgcccaggcttgagtgtgatctgcccacctcggtctcccaaagtgttgggattacaagtgtgagccacactcctggcctttttttttttttttttttttttgagacagtcttgctttatcacccaggctggagtgcagtgacgtgatctcagctcactgcaacctctgcctcttgggttcaggcgattctcatgcctcagccacccaagtagctgggattataggcgtgcaccaccacacccagctagtttttgtatttttggtagagacagggtttcaccatgttagccaggctggtcttgaattcctggtctcaggtgatccacccaccttggcctcccaaggggctgggattacgggtacgagacactgcacctggccttttttttttttttttcacttatttgacctctcagcaattgacagagttcactgctccctccttcaaatactctctactatctcggttctccttttacagattttgccatttctctttagtcttcataggtcccttgtcttctactaagcttctaaatattgggttttcagttattgtcactgtattgcaaattaccacaaaacttagtggcataaaacaattatttattatgctcacaatgtctttcagtcagaaattaaaactgggtaaagcaaggtcaccttatctctgttccaactggggtctctgttggaagactcaggctgggggactggaatcatctgaaggcttgtgaacttacatgtcaagcaattgataatggctactgcctgggagacctcaggctacatccacatgagcctgttcatgtggtttctccacatggctagtttgggcttcctcatggcttgatggcttggctgagtatgaagagcaagtatccagagggagacagaggaagaaagaagaggaagccgggggaagccacgtggccttttatgaacaaacttcaaaagtcacacagtatcacttttgctacatttttttcatccgagtagtcaccacacctcacccatgtttagattaggaagggaaacagactctatttttttatggggaatggcaaagttctaaaatagcatgcgggaccaggaatgctgttgcggcctttttaaaaataatctgccacagtcttttctggccacacaattcacatccttcccatgtgctaaatgcactcacccaacatcccctaagatttcccaaagtctaatcccattatggtattaggctgaagcttgaggtccaagatttcattgaggccaagaccatggcagataagatttcttatctggcaagtaaggtttcttcctttaaaaaaaaattctccaatgagagtttaatttttatgtttatcaaagtgtatactatattagatcatttgtgtaccagtagttacactgataaggcaatgaaaaagaaaatgtttaacgctggagccttatggtcacagaaagtttttaaaaatttaatttcaattttcatacatatttttactgcagagacatattatatactgctttggctgagtcccataggttttggtatgttgtgtttctgttttcatttgtttcaaggaattagtcaatttccttcttaatttctttcttcacccattggttgtttaggagcatgttgtgtaatttccatgtatttgtgtaattttgaatgtttcacttgttattggtttctagttttattccatagtcagataagatacttgatatgacttcaattaaaaaaatttttttagccttgttctgtgtcctaacatgtagtcaattctggagaatgttccatttgctaataaaaagaatgcatattctgcagctgttgggtgaaatgttctgtaaatgtctgttagagctatgctatggtttatctgatgtttccttgttgattttctgcctagatgatttctgcaatgctgagttgggtgttgaagtccccagctgttattgtattggcatctgtctcttcctttagatctaatagtattttctttatgaatctgggtgtgctggtcttaggtgcatgtatatttacaattgttatagcttcttgaattgtttccttaattactatataatgtccttctttgtctctttttatagctttcgacttaaagtctgttttagctgatataaatatagcttttcctgcttgcttttggtttccatttgcgtggaatatctctttccatcccttcactttcagtctgtgtatatccttatagatgaggtgagtttcttgtagacagcatatagttgggtcttgtttttgtttttgtttgtttgctttgttgttgttgtttaaattcattcagccagtttcttttaattgggaattttaaccattttacattcaagattattattaatagatgaggacttactccagacatttattgactgttttctgagtattttgtgtaacctttgttccttcccctcctattatttatttttgtggttgggttgttttctgtagtgataagattatttattcctttctctttcttctttctctgttggctctcctggtgaattttataatttcacatatcttcatgagggcagttatcatctttttatttccagatgtaagacgcccttgaacatttctcttggactagactagtggtgatgaattctcttattttttgcttgtccaggaaagattttatttctccttcatttttgaagaatagctttcctgggtataatattcttggctagctgagttttttttctttctgtactttgactatatcatccctttctctcctggcctgtgaagtttctgctgagaaagctgctgctagtctaatggagattcccttatatatgacttgatgcttttcttttgaaaaggaattctcttttagaattatttctttgtctttaccttttgacaatttgacagctgggtgtggtggctcatgcctgtattcccagcactttggaaggccaaggcaggtggatcacctgaagttgagagtttgagaccagcctgaccaacatggtgaaaccctgtctctactaaaaatacaaaaattagctgggcatgatggcgggtgcctgtaatccaagctactcaggaggctgaggcaggagaattgcttgaacccaggagacaggttgcagtgagccgaaaattgcaccattgcactccagcctgggctacaagaatgaaactctgtctcaaaaaaaaaattattttttgactataatgtgccttagagaagacttgtttgggttgaatctatgtgggaactttccagcttcctggatctgaatatctgtgtctctcccaagacctacgaagttttcagttattatgtcattaagtatattttctacaccatctctcttttcttctccttctggaatgcccataatgcaattatttgtttgcttaatggtgtcccataaatcctatatgctgttttcattcttttttcttttctttctttttttttctgcctgagttttttcaaaagacctgtcttcaagttcaaaaattttttcttctgtttggtctagtctgctgttgaagctctttattgtattttttatttcattcattgaattcttcagctctaagattcctgtttggttctttttttttttttttttttgagacggagtcttgctctgtcacccaggctggagtgcagcggcgtgatctctgctcactgcaagctccgcctcctgggttcacgccattctcctgcctc[222 bp omitted]tttttgttaactgttctatatgtattctcttgtatctcattgcgtttccttaacatgattattttgagccacatgtgatggctcatgcctatagtcctggctccttgggaggctgcagcaggaggattgcctgagtccaggagttctggcctatagtgcattatgctaatctggtgtctacactaagtttggcatcaatatggtgaccttctgggagcagagaaccatcaggttgcttagggagggatgaaccagctcaggtcagaaatagagcaggtcagccaggtgtggtggctcacacctataatttcagcaatttgggagactgagatgggtgaattgcttgagcttaggagttcgagaccagtctgggcaacatggtgaaacctcgtctctacaaaaaatacaaaaattaggctggtggctcatgcctgtagttccagctacttgcgggggctgaggtgggaggattgcttaagcccaggaggtggaggttgcagtgagccaagattgtaccactgcattccagcctgggcaacagagtgagactctctttaaaaaaaaaaaaaaaaagaaagaaaaataaatggagcagatcaaaacacatatgccaattaacagtaggatgcctatgaatagccactgcactccagcctatgcagtatcgtgagaccttcatctcaaatttttaagaaaagattattattttgaattctttttctggcattttatatattccttacgattggggtttgttcctggaaaattattgtgtgcatttggaggagtcatgtttcctcaatttttcacatttgatgtgtccctatgttgatttctacacatctggtggaacagtcacctcttccaatcttatggagtagttttcatagggaaagatttagtcatgtggatgggtcttggggcatcagttggatggctgcattggctatggttctaggtggacacagtgttgtagtttcttttgctgtaatctgcactagtgatgtttgtgagtatcccaatggcctaggctgttagagtttatggcagaagtcatgtagctttactggggttgggaccattggactatttcttaggtcagggacatgtgcatgcacatcatgggttgaccagcttggggtctagcttgctgaggctgtggccatggactgttactctggctgggggcacatgtgcatggctgcccagcttggaggtatgacagcctggggtgggacctccaggctgttcctcttctgggtgcaggcacacagtttcttggccagcatggggtcatatccactggaagaagacctgccagcctgtttctcaggccctgggcatgggcaggcctagggtcatggcctccaggaatgggcctgtgaggctgtttatcaggccacaggcatgggaatgttactgcttgggggtgtgcctgctggcagtggctcacagagctgcttctcaggcccaggacacaggcacatggctgcttggatggcccagggggatatctgccaagggcagcccgtggggctggagtactagtttctttgttttctttttgtttgtttgttttgagacagagtcttgcactctgggctggagtgcagtggcatgatctcagctcactgcaacctccacctcctggattcaagcgattcttctgcctcagcctccctagtagctgagattacaggttcccgccaccacacccagctaatttttttgtatttttagtagagacagggtttcaccatgtaggccaggctggtctcaaactcctgaccttgtgatctgcccacctcagcctcccaaagtgctgggattacaggcatgagccaccacccccgacctggagtactagtttcttaatgacagctccttaactattgttccacttgactgaaaacctatgagctaaaaaggccatttatctactccctttcccgctgtaacccaatatacccaatatggtgtggcataggataatcttctcgttcccagagggggaaaccaggaggcacatagagatcactgatctagagcaattctctttttatgttttctccctatatgcttatcttagtctgctttgaattgctataaaggaatacctgaagctgggtaaattataatgaaaagaggtttatttggctcacagttctgcaggctatacaagaagcatggcaccagcatctgcttctggtgagggcttaagaagcttccactcattacagaaggcaaaagggagccctcatgtggagatcacatgttgggaaatgagagagaaaggggaggaggtgcccagctctttttaatttaataatcagatctcacaggaactaatggcacaaaaattaactcattaccacaaggactacaccaagccattcatgagggacctgcttccatgacccaaaccaggccccaccttgaacatcggggatcagatttcaacatgaaatttgaaatatccaaactatatcagtggtcttttccatttccgtagctttaaatatcatccatacatttgcaacttccaaatttcctaacatctcaaatgccagactagaatatccaggtaaccatttgacacgttgactaggacatctcagatatttccatctttttttttttttttttgagacagagttttcactcttgttgcccaggctagagtgcaatggcacgatctcggctcaccgcaacctccgcctcctgggttcaagtgattctcttgcctcagccttccgagcagctgggattacaggcgtgtaccaccacgcccagctaatttttgtatttagtagagacggggtttcaccatgttggccaggcaagtcttgaactcctgatctcatgatccacccgccttggcctcccaaagtgttgggattgcaggcatgagccaccatgcccagccaatatttccatcttaacatgttaaaatgaattcttgatttctactttaccccacttccttcacaaacttgttattttcctggtttccccatcttggcaggtgattctactattcacctagttgctcagaccaaaacccaggactcagacttctttactttctctccctctctcacctctacatccaatcatcaacaagttctatatttttttctcactctttttcttctcatctgggttataacaacttccttattggttaccctccttcattcttgctcccttctaatttcctttgatatagcagtcaaagcaataatttaattcatatgtctgacgatggcactgtcttggtcataatcttctgtgaattcttattaccctttgaaaagaatagaaattccttaccatcacctaaaaggcccatgtatctggtctttgtctgttcctctgactttattctgtgccactttcccctcacccactatgattcacttcctctgggtttctttcagttccttagatataacaagctctcaaaaggttctgtattggccaggcgcagtggctcacacctgtaatcccagcactttgggagactgaggcagatggatcacctgaggtcaggagtttgagatcagcctggccaacatagtaaaaccccatctctactaaacatacaaaaattagccaggcatggtgacatacacctgtagtcccaactactcaggaggctgaggcatgagaaaatagtttgaacctgggaggcagagattgcaatgagccaagattgcaccactgcactccagtctaggcaacagagcaagagtctctctcaaaaaaaaaaaaaaaaaaaaggttctatataaattttattccctctgcctggagtattctctcctaacttcccactacgacataactgagtctttttcatcctttaaggtatggcattcctgaccattctatctaagttcatacccctctttattattctctgtcattgtatcctgtttgtttcctctataaaacttatcctggtcttggtgcagtggctcatgcctgtaatcccagcactttgggaggccaaggtgggcggatcacctgaggttgggagttcaagaccagcctgaccaacatggagaaaccccgtctctactaaaaatacaaaaattagctgggcatggtggcacatgcctgtagtcccagctgcttgaaaggctgaggcaggagaatcgcttgaacccgggaggcagaggttgcggtgagcccaaatcacgccattgcactccagcctgggcgacagagcaaaactccatctaaaaaacaaacaacaaacagaaacaaacttatcctgcttttaagttatatcctattagtttgtcatctgtctgtagctcctttaggtaaggagccatgtctgtgttatgcatcaatatatatccagtgcccagagtgcctactcaataaatatttattgaatattgtttaaaggtataattttgttttgagacaatgttataattaatatgtaattattataacgttaaatgtattactttctaattcttttgctgaaaatggccttttatcttttttcttgcagtaattgcccttcctttttggctgctgctttagccagagccacatcagatgaagtccttcagagtgatctttctgcacattatatcccaaaggaaacggatggcacagaagggactgtgggtgagtacctttctacattatttgtttaaaaatactagaatcttctatatgtagtggtccacagaaaatatctgcaaaatactaaatctaattacatttacctgctggttgtttatgtagtggtagcaggggagaaaaaatgcaacttttttcaaataaatcaataaaaggaagggaagaagagaaaaatacatgtgtattttgaaaaaggtagagtagtatttagaaggtaactggagcaacaggagattgtcataagtgatacctacatgaatggaaagattaaagtgaggaatgtgaagatattacaaaaaagatgagtgggtgagggagaattcgagcaaaacctatttgaaatgtttagcttacctttaaaaatccaagttaggccaggcgcagtggctcacacccgtaatcccagcgtgagaggctgaggtgggcagatcacctgaggtcaggagtttgagaccagcctggccaacatggtgaaaccccatctctactaaaaagaatacaaaaattagccggtgtagtggtgcacacctgtggtcctagctattcgggaggctgaggcaagtgaattggttgaacccaggaggtggaggttacagtgagccgagatcacgccactgcactccagcctgggagaaagagtgaaactctgtctcaaaaaaaaacaaaaaacaaaaaacaaaaaaaaaaaccttaactttgtatcaagttaaaagatacaaaaattcaagaaatcagttgtaacacaacttctcactaattatattaaattttatatctaccagtaaatagagctctttatgatagatatgcaaatgtgatttaattgcataggtcattgtacatttttttccagataaattatgaggctctatttcttaatgaagtcatgtttattaatgtcttaggcttatacatatttgacaggatcaaagaaaatatttttataaaaattagagaattactactcaaaattgttaagaaattttaatatttcatacggtttgttctatttaaagcatttgcctttaatcatggtatatatggagcaaagcatatgttaatgaatctgagtagctagattgaagagaatgtgaggcaaatataaaagtaaacatttctgttcttcctttatctctgtagattgtttgtgacagaaaatcggcaaggaaggaattactcttcttgtttttactgacagtaactgattcacctagaaccaaattgttccagagtcaagttggatagaattcttgctataaagcattggtttttcctctgctactgatgcatagagtaaaagccttataatgaaaagatagattaaattctgcttcactccagccagggtaatggctgattcaactccagctcagaacaatgacattaatgactgatgagtaatttacagctgtgagggggtggactgctactttggacagttttttgcatccctttattattttatttttccatttcaagcagcaattatttatatactgatgtcttacgctactccctgcagaaggagaatacttaatctagaaagattgcagtgttgccctacatgcctactttggaagaattttttgatccctttaagatagcaaaagtgaaatgaagtgttttcttttggtggatataattggttattctgattttttatttttccaagagattacctaataatgtctccatacgactgctgtgattcagactgatctactattattctaaactatttggaaatcttgtatttatttaaccccaatcacttagtgtgaactgcaccacagagaatctctatggggcatattgtgtttatccatacatcagagtaggaaatgagcatactgaataagacctgctgtcactggcttaaagtcctcactgaagtgccttttgtctctcctcttggttgtttccaaaaacagtcttaaaaaaaaaaatccttaaatttcttttcatgtttacattatccctaacagaatgtttgctaagtgaccttggatatctcacttggtacacatttagtttggtagatacaacttttgtccagacaacctaaaaccaatttgagggccagctgttggtgactcatgcctgtaatgccagtgctttgggaggccaaggcaggaggatcacttgaggccaggagtttgagaccagcctgggcaatatagtgaggcactgtttctacaaaaaatttaaaaattagctgggcatggtggcatgcacccgtagccccagccacttgggaggctgaggtaggagaatcacttgagcccaggagttcaaggttacagtgagctgtgtactacaacccggtcaacagagcgagaccctgtctcaaacaatgacaacaacaacccaaaaaaccaatttgaaatatcacagtgtaaaaattattatttttatttttatttttatttatttttttttttagagagagaaagggtctccctctgttacccaggctggagggctgtgggatgatcacagttcactgaagcctctacctcctaggctcaagcaatcctcacacctcagcctcatgagtagctgggactacaggcatgcatcaccatgctcggctaatgtttgtattttttgtagagacagggtctcgctatgttgcctaggctggtcttgaactcctgggctcaagtgatcctcctgccttggcctcctaaaagtgctgggtttatggtcgtgagccactaagcccagcctactgtaaaaattaaaaacaagaagggaaaatgatcactaatacagaggaaatttaaaaataataaaaagtttttgtaaataaatttgaaaacctggatgtcttctagaaaaaaaaaataaattaacaaagtttacctaagaagaaagagattgagaaaattatcgagggacagtcctcacaaaaggccatggagtaggtgactctacaagtgaggtgaacattttcaaatgcaaaggcagataattccaatggttttttttttattatatagttatttatttattattttttgagcagagtctcgctcttccttcaagaatcttcctcccaaaatgctgggattacaggcatgagccactgtgcccagccccaatcccttttaaaatgaatgctccaactgcacggaaaaagaaggaaaatttgcataacataacactgataccagaacctacccaagactaaaaaaggaaatgagagacgagtct[131 bp omitted]gaaaccccatctctactaaaaatacaaaaattagccgggtgtggtggcgtacacctgtagtcccagctacttgggaggctgaggcaggagaatcacttgaacctaggaggcggaggttgcagtgagccgagattgcgccattgcaccccagcctgggcaacaagagtgagactccgtctcaaaaaaaaaaaaaaaaaaaac[169 bp omitted]gagacaggagaatggagtgaacctgggaggtggagcttgcagtgagctgagatcacgccactgtactctag[135 bp omitted]tattgagtacagcagttaattcattcactgaatattttattgagggcctactatatatgctactatatatgtataatactagggaaacagcagtgaacaaaacttcaagaacaaaatattgggaagtctatagcacaacttttatattaatgggggaaaataaaaataaacagtaatctctaaagaagccaaaagaaacatttgataaaatttaatatcattcctaaattttaaaatattctttataaagtaggcctagatggatatatcttggacgtcacatttatgcttaatgtatattctggaatttgtcagttgtacatgattacaaacacagctttagttgtcttcagcaaaacagaatgtattgactaccttccaggataagggatacacaggtagattcaaggcatcaagtgatctcaacagaacctggcatttctccagctctcagctgtactttctttcactttgattttgttttcaggctccatgaggtggcagtatgacttgctaggaacccaggtcttcatctctccaaactcaagttgagcaggaaaacaagagtagattttctcagttgtttttacagaagccacaggatttactctaattggtccaacttggatggtttcccattcctgaactaatcacttttggccaaaggaatggggttgtctaactggctaaacctgaatcacagggtttcagagtaaagaaagaaggaaatgttattggaagaaaaagcaatgtttgctagttttaaataacaattaaagcaaagttctggccagcacggtggctcatgcctgtaatcccagcactttgggaggccaaggagggtacatcacttgaggtcaggagctcgagaccagtctggccaacatggtgaaattccgtctctactaaaaatacaaaaattagcttgatgtggtggtggacgcctgtaatcccagctactcgggaggctgaggcaggagaattgaggaggcggaggttccagtgagctgagatcacgccactgcactccaacctggactacagagcaagactctgtctcaaaaaaaaaaaaaaaagaaaaataattataataaagcaaagtctgattaaaaatggcaaataaataaccaggaataaagtgattaagaaatatgaaggacttattaaaactctattgagcaacataaaaaggatttaaatttaaaaaacaatataattttttcctggaaaagactcaatatgaaacgatatatattttttccaaatctataaatttaatgtgatcccaaacacaatagcaacaggtttttctgcccaaacttgtcaaaatgtttagaaagttcatctggaaaaataaacataaaactacccaagtgacatcctttaaaattaagagtaataggtaggaaaactagacctcccgatattaaaacattttaaagttatggtaacttaaagagaatggtagcattatagaaatagatgctgagatgagtgaagcagaacacaatcaagaagcatataaatgtttaatattttaatggttatttaatttatataacagtttacatatttattttttcaacaagcatctaatgtagaccctgctatctgctaggtactatactatggcttgtcaagggcaattaagacagtctgtatctgcagtctaatttggagatgaagaacatggacttttgagtcagacagacctaggattgagaatgatgttacctatttgtgaaatgttctagaggcatagaatgtagcaaatactcagtaaatgttatttattattaccaaaagtggttaagagctttaatagacagcgtgaacaaagtataatgggaacacaggggaaggagcaactgggagtggtatgaacagatctagtgatttaccaatgttagaggaaactgatattacttcctctaaccaagttaatctgtctataccagctctgtccaatagacagtgcaatgatggaaatgctccctacctgtgttgccctatgtgggagccactagccacatgtggttatcgagcaattgaaatagagctaatgtgaccgaaaaactgaattttaaattttatttaattttaacttacttttttagagatggggtcttgctatgttggccaggctggagtgcagtggctattcacaggagctatcatatcatactatagcctcaaactcctgggctcaagcaattctcccacctcagcctcccaagtagctggagctgttggcacattgggaccactgcaccctactgattaatttaaataaccatggccgggcgtggtggctcacatctgtaatcccagcactttgggaggccaaggcgagtggatcacctgaggtcaggatttcgagaccagcctgactaacatggagaaaccccgtctctactaaaaatacaaaattagctgggcatggtggtgcatacctgtaatcccagctactcgggaggctgaggcaggagaattccttgaacctgggaggcggaggttgtggtgagccgagattgtgccattgcactccagcctggacaacaagagtgaaactccatctcaaaaaaaaaaaaaaagaaaaatgtaaccacatgtagttagtagctactgtacttgacaatgcagatctacataagagtaatatacaagccaaagaatgatataatagtttatattattatctgggaactatcctgatagttaatatgttattcgtttcaccctactccattctccctcaaagtttctaaattcacttgattgttttgtaatcctgttatggctatgtcagatgaggacacatccatctcagggtctgcatttgggggcctatactgctgcagagaccagataggttgcagtgatacaagcaggtaattgctggctggaagaaatagtctctggcagctagtgcttaaataaaaattggagttgctcaaaacaatcaaaatgttggattgtctattggcctcagtttccttcttctatatacctccacaggctgtctttgctctttgtcttttctcttttaaattcacccttggttttcagttacataaaaatgctaacagtagggacaggcatggcagctcatgcctgtaatcccagtactttgggaggctgaggtgggaggatcacttgaggccaggagtttgagatgagcctgagcaatatagtgagaccccatcttaacaacaaaaaaaatttttttttaaattacccaggtgtggtggcatgcacctgtgatcccagctacttgagaggctgaagcagaaggattgcttgaccccaggaatttgaggctgcagtgagttgtgattacatcaccccactctagcctgggcaacagagagagaccctcttatttaaagaaaaaaaaagctgggcatggtggctcatgcctgtaatcccagcactctgggaggccgaggtgggtggatcacctgaggtcaggagttcgagaccagcctggccaacatggtgaaaccccgtctctactaaacatacaacaaaattagctgagtgtggtggcgggtgcctgtaatcccagctactcgggaggctgaggtaggagaatcgcttgaaccagagaggcagaggttgcagggagctgagaatgcaccattgcactccagcctgggcgacaagagtgaaactctgtctca[143 bp omitted]tctctactaaaaatgtgagaaaaaaaaattagctgggcgtggtggcaggcgcctgtagtcccagctactcgggaggctgaggcaggagaatggtgtgaacccaggaggcgaagcttacagtgagcccagatggtgccactgcactccagcctgggcgatggagcaagcctccatctcaaaaaaataaaaaataaaaaataaataaaaattagccaggggtattagcaggcacctgtaatcccagctactcagaaggctgaggcaggagaatggcttgagcccaggaagtggaggttgcagtgagccaagattgcaccactgctctccagcctggaccacagagcaagactctctcagaaaaaataaaaaataaaaataaagaagacaaaaccacaagacaggatttaccaccctgtgctatgttaatgaggaaaaaaaggacaaaaccttgaggtcagcttttttaatatagccatttaaaaaataattttgaatacgaaaagaggtaaacgtagtcacagattaaggcaaagacaggactgagaatcaagttgggagtccacgtcccaggctgttctagaacatatagtctctctcttctttgggatttgtattctagattggaggaggcacgtgtagccattgccatctgtcacttattttctcaggctgtcaagctatgtctgatttagttaagtaaaaagaaaatttaagttcatttttttttttcacctgagatgtaggaggaacttctaaaatactggcctgagaaaacctaatctctctttggttatttcagtagctcagcttaagtggagggcaacttgagtggagggttcaatgataggaaatacaatctcttcagtatcattcagtgttgcttaaaaggcttacacatgtgtccatctactgagggtacatgtctgcctcagaagtcagctcgccaattctacccaataggtgaagcggtagacataggtgaagcggtagacataggtgaagtggtagacataggtgaagcggtaggtttagggtcaagagacctgttagtattgctcctctggctgctctctgtctttttctatctaggatcacacgcatagacagaacttaagtaatttttccttagagtagtattaaagttttaactcatttgctaacctattggctaaactgtttaaactatggcctaaaactttaataaacaaataatatcaaacagaaaaaacaggccgggtgcggtggctcacgcctataatcccagcactttgggaggccaaggtgggtggatcacctgaggtcaggagttcaagaccagcctggccaacatggtgaaaccctgtctctactaaaaatacaaaaaattagccaggcatgatggcgggcacctgtaatcccagccacttgggaggctgaggcaggagaatcacttgaacccaggaggcggaggttgcagtgagccaagatcacgccattgcactccagcctgggcaacaaaagcgaaactccgtcttaattaaaaaaaaaaaaaagtatatatatacacacacacacacacaattcagttacaaatgatgatcatttataggagaaaaaagggaattggatgtaaaggaagaagtcagggagaaagaggacaaagacaaatggtaagcaacgtaaacccttcttatttctgtagtttgtgggctgttttcgtaggccttccatattccaataaacactgtatttatccagctaattggactacggaagcagtgttaatcactgcttatttttctaagcataggaggcttggctctcctggtgataaccataccagacaaccaaaaagaaaccggtgctgggaactagggagcagtgtggtgagagcatttctccagctggaagaaatcaagccaggaataggtccagccctggccaaaggttttctcctcatgacataagaatatttagtggcagctgcaggctgatgattttccactagataggttgtgattttctctcttcagaagcagcatttcatttttcttgagaaggatgaatttcttctatgaaggaggaacttgactaaggtgacctacttctgtctttaccaagcagagaagtgaaaagcagttttacaaggctcttcattgggggtttctgtgtttctttcacagagattgagacagtgaaattggcccgttctgtcttcagcaaactacacgagatttgctgcagctgggtgaaagacttccccctccgcaggagaccccagctttattatgagacatcaatccatgccatcaaaaacatgcgcaggaaaatggaggacaaacatgtctgcattcctgactttaatatgctcttcaacctagaggtaaagggcactttcggagagtcagtgagattttaaagacaaaacaaacaccttcatggtcctgttagaaaaggaaaacttctgttatatttctaattgtatctctggtagattagagtagggctaagtgcaaagtggcacaaatttgcaacagaaaaggaactattttacgttcttttgaataggtaatgcattcacatggttcaaaattgggaaaataaaaatgtctcttatccttgcctcccaggtactcagttcccttccatggaggcaaggtagtcttttgtgtcaccttccagagctattctataaacatataagcaaaaaagaaaatgattaggctgggtgtggtagctcacgcctgtaatcctagcactttgggaggctgatacgggaggattgcttgagaccaggagtttgagaccagcctgggtgacagacatagtgagactgtctcttaaaaaaaaaaaagaaagaaaagaaaaaacaattaaaaaaaattatatctcaataaagcagttttgtaaaaaaaaaaaaaaaaaaaaaaacccaaactatttctatagtataatcaaatggtgtattaagttctcacattactatgttgctgaagcaacacaaacacaaaaggaagatttaagactgacgcagtttatttcatgtgattttctttttaaaatcttggtctctgagataggaaagtagctggaattatatttcataaatctctgtatctgacaaattggatctatatgagccttggcagcttaataactattttcttgttatctttcttttctttttctattaaatgtattatgttaatgcaaacaagtaggtttgttttctttgcctgtcacttgcctcttttcttcactcaagtccataacttaaaaattacaatgtagtaatttatacaaagcacaatatttcctctgtttagcagctaaatttacattttagctgtcaaggtctaatcagcaatgatggcaggttggtaattggtgtttatgttataaagatagatcagctgatgtctttgtttctagtaccatggccatgcaaatgtaacccagaaggattgtgtgataaacaatccttatatcactatacctacttgaagattatactcatatttggggcattgttgttgttcgttgacttccttggtttctgttttgcctcctaatttcaaaattagcccaaaggacttaactcagaaaggagaaccttgctatagtgaaatagattttaagagcaatatggcaacacatatgtagaacctaataaattttcacactctttgatctggtcatttcacttttaattctttattataagaaaatagaaatgcagaaaagtcttaggcatgtgttttgtttgacataaatgtttttacaacattgtttataataaattgaaaattatctaaatcatgaaagggaatgataactatgatatgctcatataagatgcatattttaagccatttaaaacaatgtctttaaataaatcttagtgcgatgaggaaatgccaataataaaaatgacgaaaagtaggctataaaatgtcatgcacattctgatcctaatttcatttatatatatgtgtatatatatatatatagagagagagagagagagagagggagggaggactggttatctgtgtatggtggaattattagtgatatttcctttgttattagtctaaattatcatacattattataatagggaaaacatcagtgaatgttttgtgtttttttaaaaagaagctatcctttttttatttttttaagaaatccacttagcttccttttgtttcttgtggtgctatttcgagttgtttaaaaatgagtactgctttagtagggatagaaattctacctgtcagcattctttatttctttttttttttttttgaaacggagtctcgctcgctctgtctccaggctggagtgaagtggcgcgatctcgactcactgcaacctccgcttcccgggttcaagagattcttctgcctcagcctcccgagtagctgggagtacaggcgcgtgccaccacacccagctaatttttgtatttttagtagagacagggtttcaccatgttggccaggatggtcttgatctcttgaccttgtgatctgcccgccttggcctctcaaagtgctggaattacaggtgtgagccaccgcacccggccaggattatttctagagagttgtttaatccgtccttcatgtcattaaagttgctgaaagaactagttgtaatgtgtgtgttagacaaaggtttcataacattttggttattattctatggacatttatatttgatacttttgtgaatgtaatatacccttttaaaagtaactttttcagccaggtgcagtggctcttgcctgtaatcccagctacttgggaggctgaggcgggatgatcctttgagcccaggaattcgaagttacaatgatctgtgatcatgccactgtaccctagcctgggtgtcaaagtgagacgctgactccaaaaataaataaataaaaagaactttttcaaagtacagatatacttgttattttagtagcccttccaaatccccatgagacagcaactcgtccctgcctaacagatgagaaaactacatgatttgcttaagaatcaatgacaggcctggactcctctaaggctcttagaacagaaaaagaagtcaaaagacttgcaaatgaaaattattacatactgttgcctgaagggagctcaggactcagtgcgagttcagtgcgtcacagatctcctaagtgagacagatctgagatttaaacacttgagcagatgataaagcagcaaactgcttaatggttgatgtggaatcttatgattaggcttttgtcaagacaaagcacagggttggaagatcctcctctggcagtttactttgcaaggaaatgtgaaactaaaatcttagatcatggggtgaggcaaagtggtcagccgcacagggcatttgagcatctgatgtggttcaagtttggtaaactagtttagagatgctgtgctatttgtggtgagaatgcagtgtgactgggaatgatttatgaagaaggtattatagtttagaagtatgtttatgctttcatatctttatatattttaaacttgatttaattggccttgtgttggaagaccagttattttctattgttctcaggttctaattttgctattaaagtactttcattttgaaaaaaatcactcaatctggagctgcttttgttcaattccttctcataccctccctatcccccctcccccaacttgtaacagcaattttgaagcaaatgtacgtgggtggtttccatggtacaagacaacaactttcacagagagagggcacttcagcttgagctaattgggcatgacatgttccagtgttctggtgtgtaaacacagataccctaatattgcaggtatttcagcagttgatcaggcatgttagagaaggaaaacatttagtctcattattctgaatgacaaatgcagtggaggagaaaggatgggcaacaatgatgccaggagattggttcatttgaatcatgctatacccaactcccataactgttctgtgtttctgttgacaggaccaggaagaacaagcttactttgcagtgtttgatggccatgggggagtagatgctgctatttatgcctccattcacctccacgttaacttagtccgccaggagatgttcccccatgatcctgctgaggccctgtgcagggccttccgggtcactgatgagcggtttgtgcagaaagcagccagggaggtatgcccctttctcataagttccagctagaaatgtactagctgagctcaatttggtctgtgtggttaaagggctatttagattttctctttctgggcagacattatccaaactgtattcttgactcacagtattggattctgttgtagttccaattccctcctcaggaagagtttcagggggtacaatgaggtactgtatagaaaatctcaagctgtaattttctggattcatttctgtaataactgctggatttggcaggtgagtttcatctttcttttattcaccattgcctgtcaggttcacaccaggaccatctctctaagcagactcttgctgacaagatctggatatggtgaataaaacaatggtctaaaaaagaaacagaaactgggattacttccatacatttggttctaaatgggtaggcagtgttttgctgtgtatctcttgagggaaaattcgcttggagagggtgaatccttaaatgatccttgagctgatttttctcttaatagggagaaaagaagagctcatgtcctacattgcgaaggttaatcagacctaagttttttttactttgaataaatggcaagggctctatattaaggtctaaaagtaaaaaaattaatctaattatcgttctgggtattggtacataattaactacagtgttctatattggatttttaactggggacgaataaaagaatttttaatttttaaaaataattacagaagtagatacagacaaaaaataagactcctgccctgtgacttaaacattaactctttttaaaatgggcttggagagatcagggtaatcatttaatccattttttgatagcatagttatgctacaagcaataatggggcttagaattaatgaaacaataactcagacctatttggtattaagaaagagaattattcttcatctctcccctcccctaagtttggattaatatgcaaatccaacagtaaccagtagagtccacacaaagaggtgggtctggagaataaagccactcttgacctcagagctccagtctcttgaggacctgcattctgcttggctctgcctctcttgaagctgtgggcttttatcatctgagtcgaggacaagggccggcccctgagaggtgacccgtaatcatcaatgtgaaacaaagagattcactctgtcttcttcatcctctattctattctttttttcctctgtcttctcaaaattatgtgttgttgttgttgttgttgttttctgaccatgtttacctcatttgttttgtcagtgaccctggtgtctctcagttctgccaatagttctgaataatttaggtttgtctcagcgccccttttctccttcttatgcttccatgtgctgctaactgctgggaagaaaacagctattcctgttatgaagcagccctgcctcctgttctctccagggcatatgcactgaagtgtgtttatcatgtgttctagggggctgagtttttgaacattctgtgtgggaagacattttattggtgggtgaggatttataacaaactttccctatatagggaaaacgagaagttgtttttctcattggatacaagagaccttttaccacccctgacgcattggttctaatttaggccaggtccttagtaacagaaagtcatgctcatttggtggtgactcatgtcaaatggggatgtcattttcgtatagtaggaccaagagctttaagtacagtcgtagctactgcagtgaaattccaggctgttagttctttatgcaatgttccaaaagcaaagacccctaaaaatactgtaggaaggatatttttttaaaggtataagcatcttagtactccagggaacgtaagctgtctcttggccccttagcttaatttccagagattagagcatctgttgtgtaccaatcagatgttttatatatcattttatacagctaggactctcccactgaacaaatacgatgtcagtaatgaaatggagagcagaatatagaaatttttactctgaggattggtatagaggatttagtgcttgactgggaggaaaaagaatttcaattctgtcttatatactaatagttacctgcccttgggcaagtcacataacctgccatagttttcttatctatatttaaagtggaattaataatcatcctcgccctgcatatcacagatcaggtggacttatgtgtgtatatacacataaatacatacatgcatatacaaatgcattgagacaatgaattattatatatgtgtgaaattccattattaatagtatagctcccagctgaaaagcttaattataaattgcttctcaataagaatgtagtatctatttcttttcactgagtctagttttatttaaactgttttcagagcttaagatgtgggaccacaggagtggtgactttcatcagaggcaacatgctacatgtggcctgggtgggtgattcccaggttatgcttgtgagaaagggccaagctgttgaactaatgaagccacacaaaccagacagagaggtaagtatggtctgttttaatagagcccatgctctagttattagtttagattttctagttattgattaggattcacttactttttttttttttgagatggagtttcactctgttgcccaggctggagtgcaatggtgtgatcttggctcactgcaacctccgcctcctgggttcaagcgattctcctgcctc[134 bp omitted]cggcctcccaaagtactgggattataggcgtgagccaccgcgcccggccaggattcacttaattattacaattattgctatcacatcagcaactgtgcccaccctccaatggagaaacaaagagaaccttttcatgagctgatgagtattatatctgttgtttactgttaaagtaaatgaataaatcctgaatccagttatttgcttctttttattgcattgctgtttaggatgaaaagcagagaattgaggcccttggaggttgcgtagtctggtttggtgcctggagggtgaatggaagtctgtcggtttccagagctattggtaggaaaaacaaatttttgtttctccaaactgtcctcttctagctcattctcctgtatcaactctgatacagggaacctgagatgataatttatgttaccagaatgcttattattctttaaaataataattggataacgtctcttttaattgtttgatttagttaaacctgtacatttatatacttaaattccattattgaaagagaactgccaggctcagtggctcatgcctgtaatcccaacactttgggaggccgaggcgggtgtatcacgaggtcaggagttcaagaccagcctggccaacatagtgaaaccccatctctattaaaaatacaaaaaattagccaggcgtggtggcgggcgcctgtaatcccagctacttgggaggctgaggcaggaatattgcttgaacctgggaagcagaggttgcagctagtggagatcgcgccattgcacgccagcctgggtgacagtgtgagactgtctcaaaaaaaaaaaaaaagagaaccatatcaagaaatgcagaattttctagtttctatacatttaaaattttatggaagcct[136 bp omitted]agacttcatctcttaaaaaaacaaaaaacaaaaaaaacaaaggccgggcgcagtgggtcacgcctgtattcccagcactttgggaggctgaggtgggcagatcatgaggtcaggagatggagaccatcctggctaacacgatgaatccccgtctctactaaaaatataaaaaattagctgggtgttgtggcacacgtctgtagtcccagctacttgggaggttgaggcaggagaatcacttgaatctgggaggcggaggttgcagtgagtcgagatcgcgccactgcgctccaggctgggcgacagagcgagactccatctcaaaaaaaaaaaaaaaaaaaaaaaaaaaaattgctgggcgtagtggcttgtgcctgtagtcctagtacacaggaggctgaggcggaaggattgcttgagtccaggagtttgaggctgcagtgagccaagattgtgccactgcactccagcctgggccaagggagtgagatcctgtcttaaaacaaaaacaaaaaatcatagtgtttctcatttcattgcattttgggtcaaatcagtatttttcagagaatggaagcctttctccgtattttatccacattcattttgtttatgcctctaaattatttccatgaattttaaaatgacataaataacagaataagttgataggaaaagcattgtgctttttatatgaaaactactttctgtatgtggaatacagtcacctgtcagataaccctggagtttcaaagaaccctatatccctgggacttaaatttttcaaaagaagggaaagtcaatgaaactcggtctaaaacgtagagattaaacagctaagttggctggacaaaatacaagggtataagttcaaagaattaagctatttctgtctttgtctcactttgggccctgggtttattattttaggcttcatggcttagcttcacttcctgtttttttaaaaaagaataaatcaatatgtatatctatatgggtgatatgtacattacatgtatactgcagtttttaatctctgcttccctaaagaaatgaagtaattagacatggttggaattcacatctagtctcaaaatttagttaaaaattaccaaaaattccagaacatgaagaaaatctgaaaggatttagctttcaccactgatttgagttcctcccactctttgggaaggtgctagcaagctgtgaagtggcccaaatatgagtagaaagctgaaagagaaatagctaaaagagtctacaaatacctcctgaaaaattgagatttggcttgaccttagactggagggaattattaggaactctagaataaggccaaaaaggggaaatgtctcatttctaaaatatacccttatatggaattattattattattattggtggggaaaagtctttatcatgcacattgtaggtttagcaggacccactacccatcaaatgctacccttgactgaaaatcaccgaaccagaggactatactatctgtggaaccaatttacgttaatgatcattatatgagtgcttgagtggccagtgaattaggtttacaactcaaaccaaacacctatttctcctgatctgacctttgtcagaggattgaggatcatctttaatacttgttacagaactaacttaatagagaataccagcttcttcttctaaaagggaaaaccaaagcagggaagaatgtcccttaataagtgacaatctcagagaaaaggctgggtatggcagccagcactgtggaaggccaaggagggaggaatgcctgagcccaggattttgagaccaacctgggcaacatagtgatacctcatctctattttaataataaaaaataaacaatctaagagtggataagggagacttcatacatagagtgacttttgagttgaatgtggaggataatgtgctgggaaggaaatccctacacaggtagagggaaatataaatacacaggggtttgaaaaggcatggcatgttttaggaaaagcaacaagtccaggaggttagagcagagatgggagtggtagattagcagtgttggtgccagattgcaaagggccttatgtgcgaggctaagtagtctggactttaccaggtgaatacgcagaggggccacagggtcagctttgtatttataaagatatttgtatggaagctgggctagagtagaaagagcctggctgggagacattcatacagtttgttacagagatgaggagagctaaaaaggaatatggaggagggtatcaactgatgagatggattggttggtgggaaaacctactaatcaacaaacaatctggcactggaaataggcagtaacataaaggagcaagtgtagatttagtttcttgggcagtttgatggtgaaggggagaaaggaaatagtgtggtggcttaaggcaaaagctgattcaggaaagggttcctttttattgtttctatttttaggacgaggagattttagatttgagcatgtttgtaggacaaggaagagagcaagtagaggagaaattgaagacgagagagtagagaagccagagcagcacaggctcactgttaggatgggaaaaggacactgcttaccctgagaaaatggtagctgatatgggagaatctctacagattaaacagtgcatgtgtggcaagggtgggaggggaattgagaaaattcaagcctgatcaacttgtctttgaagtaggaaattaggccatttaccaaaatccagtagcttaagtggatgagggagttgaagaatttgagaaagaattggaaaccacatggaataaaatggggggctgcaaaaggacaagaaaaaggactcctgggcagagttcagctctactcaggaaagaaatgatacttataaaaatgaaaaggttttcaacagtttctccccatgagcccttcagatttatgatccaaagttgacagaggcatgatatgtttcctaacatatggagagaagaggttgaagacaaaaggatgttgccatttctacgatgaaatggatattcatgccctcctaccaaatttgggggcgaaatgtcatgaatttgacacccaacagtagagcaggtgaaaagccagaactttggcagcattttctctgtacaaatctttgtatgttctgttccaaactaacagttgcagcagtcttttaattgaagcactaaaacaagatttttgggaacagtgtgactcagatcacatttatttttagaggcggaattcaaaaaataataatgatgataatcatatagtcaggtagaataggggatgggaactttagtaaattggtgaaggacactgaatcccatattggattttatttattatttatttttaaatatcttttaaatttttgcattttctgcttaaatagattgagttttaatgagctctaacaggctatggaggcaccttagcatataagtgaagttgattaaatcaaaagcatgcttgggaaagatggttttgactcctgtaagaaataatgaatgagggctgggcgcggtggctcacacctagaatcccagcactttgagaagcccaggtgggtagatcacaaggtcaggagttcaagaccagcctgaccaacatggtgaaaccctgtctctactaaaaacacaaaaattagctgggtattgtggtgcgtgcctgtaatcccagctacttgggaggctgaggcaggagaattgcttgaatccgggaggtggaggttgcaatgagctgagatcacaccactgcactccagtctgggccacagtgagactctgtctcaaaaaaaaaaaaaaaagaaataatgaatgaatgaatggagaagagcctagatatgagtaagatgagaggttgtgtttgtgaatggaaggagtgaaatgaacatttataatgtcgaagactaatttcttacctaatagatatactaactcaggtaattatattaattatttgttgctctgtgtatctaatcatgcaacctgctagatagggcatgtgcccacattggttctagcagagttatccatagggttcctaatgagctttctagcctatttgaggattaaacagggatgttaaatgttggaaagaaacttttttttgagacagagtctccctctgtcatccaggctggagtgcagtggcgcaatctgggctcactgcaacctctgcctcctgggttcaaacaattctcctgcctcagcctcttgagtagctgggactttgcatgcatgccaccaggcccggctaatttttgtatttttagtagagacaaggtttcaccatgatggccaggctggcttcgtactcccgacctcaagtatcctcccgccttggcctcccaaagtgctgggattacaggcatgcgcctggccaactttcttgtgtcaaagagaacctataacagatactagaaataatgaatatatagtcagattactcaagtgagtttatcttcattttaatattccctgagtcaaaaagttcggttttagtgcaatggaaaggatagtaattgatgagagttgtgtaggtgacaagtagaagagctaggatttggacccaggcagtctgacactagtgctggtgtccttaaccactaagcaatatgccactgctatacagtaaagccctttgtaaatatctggagtttatttcttgtttttataatactatgtaatgatgatttatgataccctactctaggaattattgctcagtaccctgtgtgtggttttgtttttatttttttgtaaagaagtgaatgagaggccagatgcggtggctcatgcctgttatcccagcactttgggaggccgacacaggcagattatcagaggtcaggagttcgacgccagcctggccaatatggtgaaaccccgtctctaataaaaatataaaaattagccaggtgtggtggcgtacgcctgtaatcccagctactccggaggcggaggcaggagaattgctggaacctgggaggcagaggctgcagtgacccgagattgtgccactgcactccagcctgggcgacaaaaaataaaaataaaaataaaaaagtgaattgagagtcccttgttgtagtcataagctatttggttacctcataggctaaggacccttttgctgcactctcacaaggtacctaaaggaatgtaatcaatgtaaacaatgaatggatttggaagtgctctggatctgaaagccctaaatgatcaattatctcagtagtctggtgatagaaacctagtttagtgtggtcccaaggtctgcagtctcgctcctaccccaagcaccctactctccaactgtacattactccctaacagttgcctctgcctttgcttatcctgttccctcaattgaggcaacttctctgcctggtgataactaacttacccttcaggaccagctcagatgtcattctgtgagaggacgaagctaagcaagaaaaggaagagagaaaggcccagaaagaccttgggttctcacagttgttaatgagtggggaaatgcacaataacaataaagacagaagtggggcgatgagcagagccatatgaagaatatggcagtctctaaatataagagaaaaatggccatacattttgtctgttctctagaagttacaggtaaagcaccactaaaaaatagaaagccaagtgggttgggaatcaagaaaactgcattcagctcccatgtgtgaggccttgggtcagccacataactcctcctggcttaagggagttagacttgatttataaaatctcgtgtaactcaaaccttccttcgtgctcgcagcatgaagctatttattgatttctaaacaagaatagaacaaaaattatttaatgaagagaatgatcagagctttggtttgcttctttcaatgtgggcttgttttcaaatttcaattaaatcaaaaccacctgcaaaagaacagatctactgaatcaaccatgtcttcctacacagtgtactgaatttttcagtacagcaacaaacttttagatctgacattgttgttacactcagctaagcctaaatcatagccagaggtgcagattcagagtctaagctaggtaaggacttatgcccagtaactagcaattatttaactgggagtaaggagtaagcagatctgattaccagagaatttaagtattttgtcaaaaactattttataaattctttccagtcaagtcagttcacaatccagtaagctgtgatcagagtcatggcattggtcataaacgttcttagcatgcaaggtaaaacaaatgctaatgatgcccctacactctgcttcccgcaggagatgctgaacataagccatatatctgtggggatgcagattctgcctccactgttctggatgggaccgaagactacctcattctggcctgtgatggcttctatgacaccgtgaaccctgatgaggcagtgaaagttgtgtccgaccacctgaaagagaataatggagacagcagcatggttgcccacaaattagtggcatcagctcgtgatgctgggtcaagtgataacatcacggttattgtggtattcctgagggacatgaacaaagctgtaaatgttagtgaggaatcagattggacagagaactcttttcaaggagggcaagaagatggtggggatgataaggagaatcatggagagtgcaaacgcccttggcctcagcaccagtgctcagcaccagccgacctaggctatgatgggcgtgtggattcattcactgatagaactagcctgagcccagggtcccaaatcaacgtgctggaagacccaggctacctagatctcacacaaatagaagcaagcaaacctcacagtgcccagtttttgctaccagttgagatgtttggtcctggtgcaccaaagaaagcaaatcttattaatgagttaatgatggagaaaaaatcagttcagtcatcattgcctgaatggagtggtgctggagagtttcccactgctttcaatttgggttcaacaggggagcagatatacagaatgcagagcttgtctcctgtctgttcagggttggaaaatgaacagttcaaatccccgggaaacagagtttctagattgtctcatttacgccaccactactcaaagaagtggcacagattcaggtttaatccaaagttttattcatttctctctgctcaagagccttcccacaaaataggcactagcctgtcctcacttactggaagtgggaagagaaataggataagaagttctctgccatggaggcaaaatagttggaaagggtacagtgaaaacatgaggaagctcagaaagactcatgatattccatgcccagatcttccttggagctataaaatagaataatttttctttcaagtaggttagctagctctcccccaataaaaataccactatcagagtagaaacaaggtagacatttctaaaacatatgtgcttcattatgaatccatggatggctcaattcttaaatgtaaatagatctctaggaaactcaaagtacagtgttttcaatctaaaaagaagtattggcagtttcacttgcaaaattacacagctggtccctgtgatgtgtctcgacaccaatacacaacccccttcccaccatccttcatgtcactagatacacaacccccttcccaccatcccttcagtcactagtggaagctttcaagttagttatttcagtcaggatatacagtgttgaaatctcaatgcagttgaaatctggtctgatgtgcctaatttatctgtggaaaatttaatgctgaattacatttggttgggaaatgtccctcaaaatcctgggcactatgaaggaaccccctgccccctcacctttttgggtaggtaaaagactaaaagccatatggattttaactgataacaatgaaagtggtaaatcagtgtaaaagtgtcatattctcagacttgtgaggcggtttatagtcagaaagatttacggatttttttcctgtaacataaaagattgtgaactttttttaattaaaaaatatttcctagggctgtagttatttgggagtttcataacctgttatggtgcttttggtggaaatttttattatttagcattttaggagaccgctgtcaactggttttaatctatgatgctaatgtgttttccactgtaccctcatctcaggaataaaactgctttaacggagatgatgtcaggtacaaatacactatagagtcaaaataccatttacaaagaaaatcaaaagcatttctatattttgtctttttttagttcagacagcaaaggcatgtactactataaaatacaaagtgattttagagaatgaaaaatgctacttttatcttctctaaaattatttcccccaaggtagtgaagtaattggaatgaaggaggctgaaagtattgtctaaagtgagcccagaggccactgagaatgcagattactgacagccaggtctgtttagttgtaattggaagacacatgagtgtcctgcttacatgtagcttcagactgcagagacaggacgtgtgcttttcatttcaatatttagttatatttgatattttgaaactgtctgctttttgctatttctgcagtttcaagttagttagaagcatgttgtcaactaaagacaacaaactatcagattcattcattcagtgaagcagcctctgattctctaagagtcacgaatgtcttagtgttaccctcccctagtcaacagcagaccagcctggccaatgcctatgggtggcccctctggagtgctcactaacaagggtgagtgctctcgctaagaagtgtcccccgcctaatcatgtgtttataggatagtacacgttccccaggcccataacagaggactaaaatctctgaattttaaagacacagatgactggcatattttggataccagtatagctatatcaaatagacaaaaacagcttcactttagcaatgatcagattgttaatctacagattttattttttaaaatttggatgtaagtagagactttcagtatttgttttctcttgattttgaagtcatttcttcttctcacgtctgtgacaaatggttgaaaaggagtcaacatggccccaactatagtgccggaaccttttcatcattctgaggctttgccccacacatggtcctcactcatatctgtcaccttctgaagcctagatcttgttaacccatcaggtgcagtgtcagtttcaaatcaaattatctaagaaaacaagaaaacaaaggcagcagactattggtacacattatagtccaaagtgcttagcgaagtaaaaaaaaaagctttttaaaatttctattgttgtctattggtaatgtttttgatcagaataaagagggtaaagggaaaaagttactacacatgctaggctttctcagtggggaaaaaaatggctggatagaactgggacaaacacagacccatctttaggggtctggattttgtaggtccgactacacagcagtgttaactcatttctcatgccattagctctctacaaaataaagcaaagtagttctagtgtggtcgttataaaccaatattgtgaaaaatagcaactattcatttgttcacaacatgcgtatttatagagtagttaggtaccatttgtaaggtaaatcctttaaaattctataatacatactaaaatagtggttattggtctgatatatgctgctcttggttctataaactagataaaagcagtgctttgtgaaatgcagtgttctctcttaacgccactggtgataggaagtagttcccttcagttcaaatcctgtgcccttatttgctgcttgctgacgtaagcaataagtaaccctctaactaatggtatctacatatttctgtaacttgtatttaatgatggtgtacctggtgattgtaaaaatattagacagatataaaagtatctatataatatctataaactgttaatgctgaggtatagtctgtgaattatgtgttttgtatttttattcattgtgtaatttagtggtggtgaaagttctacactcaatccttaaagagtggcagtatccctttttcaatttaacatggtctgcatcaatctgtttgcctgctaaacaagttagaataggaaatagtaaaataaatccaaacaagagtgtaatattggttagggaaacaaacttcaggtcaccaactgaagtcattacaaactccttgtacattcactgtgagtttcaaagggagtcagtccctaatttacaggtttcctttgttcactttctagatgtgtacttttgagggacatgaggttaggcaacattacagcaacacacactggggctattaatcccatttaggtctgtactaaagaggatgggtagaaacacatatgtatataccttttctttacctagaagtgccatccattgtccttgaattattatgattaaagttactgttgcatttaggaggctccttgaaagtaacaccttttccaaggacaatggcaacaatgtcaatgtcaacactgagtctaattttgaccacatttatagtggtatagtgtcaatactgcattttcatgacaaccacactccactgttgaaacactgtgccagtgagaagtgcaacatccagtgggcagatgaaaatgatgcatggccaagttcagtgtttacagataaaactgctgtggttcaagtgcttccttccccatcaaatccttgataaggctttgtgggaaaatgatctaaattattgttttaatttttaaacctaatttattcactcagtgaacattcttacctaagcaaggctataaaagggaatactacagttttgtccacactttaatttgagaccatttttctttgaatcgtaagttagcaaaagaaatttttttcacctttgaaaatcacgtgatgttaaaggacaaatgcccactcttctattctgatctgcaaatagcttaaatgtctcttgcaaaacaaagtaagataccaccagtattacaacacaatgattttccagacaaatggtatggtgttgaaaaataactgttacttcttaaagcagcattttatcttctattttgaagactatttattgtaataattagaaaacatgaaatagggaactccagactgacacagcagttgtttttgaaaaggaaataaactttgatgaattagataatccagatacatcattgtaaactcttactctaggtgctctttggtgagagacaggctttgttctcttgttcataacatttctctgcaaagaattctctatggagtgaagcgaatgaagtgaataatttcttaccaaataaatttatcaatttacaaatctgctctacatctcacttttgagttcagttgtagtcatgagtgatccttcatattttattaaaagtgttcattcaggtaaggtgtatgttgaaattttgccaattatcttaataaaacctggcaatttaaaaaccactagtcatttgtctttttatttaaaggaaaggtaagttatttactgtttaaatttgtgcagatttcttcagaactggaaaataaaatcctgagatggacgttaagtttggaagcttggaacatttaaaaagaagatttgctaaatgctgctgtaacattattttaccccagaagagaggtatttagccttatacatgttctcttcattagctgaactgcgaggagagggagtggtgttataatcctaaaagaaaagaggaacccgacctgccaaggactaagcggtggtcatcaaatctcccaactacttcattcttagaactctgcatctaaccaagctttcccctttcgcttagcctctttgagtttcaagctagaagaaagtaaggaaatcatcagatgagctgtggtggaaagcctcccaaggactgctgataagtgagtaaaaggagacagagacaaaaaggacaatgtgggggagggaagtcacttacgacacctgcatctgaagggagggaactgaccttccaaacgagtcaaccttgtcaatacactgcactgttctcctgcctaccagtaaagaaggcctttacaattaattttacatagtttcaaaaatcttcaactcctaattccctaaattcattcagtccttggcatgactttatatagaaccaaatgaacaattgagaaaaaaaaggtgaagttttgaaagaaggacatatttgaaggggtttactgaagcagggaatgacagaaaaggaacattttgattagtaagtgttacacttgaaaaaattccctaaaatatagtattacttagatcaaaaggaacacctctttctgaaggagcagcacacagcaagacagaagggaaccactaggtacagtaaaatcatttgaacatcatagaaatttacccaagttaccaaattatcagaaacaactgtctgtactgacaagctgcataactgagcattcccccccacacccgccccctgttgctgtcagtgtgcatcatttcctttccttcttttgagatggagtttcattctgtcacccaggccggagtgcagtgacgtgatcttggctcaccacaacctctgcctcccaggttcaagcgattttcctgcctcaatctcccaagtagctgggattacaggcgcccgccaccacacccagctcattttattattattagtggaggtggggtttcaccatgttggccaggctggtctcgaactcctgacctcagatgatccaccctcccacctcggcctccctaagtgcatcattttctttttgattgcaagtttccatctgtcttttttttttttttttttcttttttgagacaagagtcctgctgtgtcaccctggctggagtgcagtggtgcaatctcggctcactgcaacctctgcctcccaggttcaagcaattcttgtgcctcagcctcccaggatgctgggattacaggcgtcggccaccacgcctggcttttgtgtttttagtagagacggggttttgccatgttggccagactggtcttgaacacctgacctcaagtgatctgcctgccttggcctccccaagtgctgggatttacaggtgtgagacaccacgcccagccccatctgtcatcttaacagcaattagtaaagaacactttttctattgtgctttagggaacctccttttgcttggcctaggaataaccttatggaagatcccttacttacatttaaaacaagtcacattcttttctgagagccccaactgttgaatatgtttagtaagaagcgctcttccctgggcagttggttgagcctgcctcttatgctgagctgtaggatgctgccccagtcacgcaacctccagatgaagtgtgtcctctcctcattgtgcaaacaagggccctcacacacaggttctatttgatttttataatcttgctttaggaccagggaaacaaatgtgaaaaactgtcaagaatgatacacatttggggaaaccattttccaaatgagtaactggagtttaactaaagatgatgaaaaagttgtccctgctagtcattacattgagtagtatgacagctacaggattaggggtggccaattaagccaaatcgagttgctacgggttcactaggtcaaatgaaacccagtgggaggtgagcctatgcagcagcctttcccaaatgcacaccaggagacactgactgacctgaaggtctcgggcaaggactctggcccgcagggtctgcagagcaggaatggaagggagactcccggtcaacatgccagccagagaaaaggattttagaaagagagcagcccgtactactgatgtcccaaactacactgtggctaatcttaccatttgctcttaagcatccctaagcagagttctaaaacttctataaatctagactatgaaggcatgtattggtagatgtgagaatgagaggtagaatgaggagaaatctaaaaatattaccacataaaaattcaaatgaatatgcaaaaaagaaaatagctcttggggttttctatttcccaaatttttctaatcttatcacctttataattcaaacatttaaaaaactagataaaaaaattaaaaatggctcattttctgaattctggttttaggattaattacactcatgttttacattcaataaaatgtgtgttttacatatatacatttttaaatcacagcacttccagcttccactccgggatgtaggggtagaaggagcatttcttctactcttacaatgcaaacgagccagatgaactataaattaggacattttttcgaatccattggaaagctgaggttgcagagtaaccaagtggcaccaaatggagaggggcagttgcctgcaaggggagagaagacattagcactagtttcgtagggtcgttgtaaacagacactggaaagaataggctagctaaaagtgatgattggtgaaggcagaatatgggctgcaggagtgttaagacccgggggcctgcagaaactaggggagtcgccctatcttgcaggctttttctttacaatctctaccaggggctcagaaaatactgtaaagagccctaagaagtgtcggctgtgacacacacccaggggagtatacagcggccttgggcatgggtaaaggaacttaccataccctttctctcatctcacagaacaaaagcaccctatgagggaaaaggagcacaaatactgttgccgtctggacactggtgaaaagtcactgcagcagagagaagggactatggaagaaaagccccatcccagaggagggggcagaaatatcactgggcccacaattagctgggaaggggcaagtaaacagagaccctcccaaacctagggacacagtgcctaaaactgcaacctaatccaagaacgccagcccctccccagcccccgttacacttcaagaaacagcagagtatttccaggaggaggacagcagagcaacggaagcagagagagagaccctcttggagacccagcacaaagcttctgagcctggaaactcagggtcagaaacacagtgctctggtatccaacaccaatcagaaatacaaggtatcatcacaggaactcgagaccactaaggataatcatagcaaatccaatcttgaaccaagcacaactcctaactactattagattggcataaaagtaattttggttcttgccattaaaaaatgcgaaaaccacaattacttttccaccagccataatatattaattcaacctctgccaacaaaggtcttagcagcaggaaaggcctccttactttcaggtgtaaaaactattcaccaaagtatcttgtcctatgtgagatgtgttgctattaacaaaatatatagagtcatatgaaaagccaagaagaaaacattctgaagatatgaaacattcatcagaaccagagtcagataacagagattttggaaatgagagagaattttaaataattattgttttgagaggccaaggtgggaggattgcctgaggtcatgagttcgagaccagcctggtcaacatggcgaaaccccgtctctactaaaaatacaaaaatcagccaggcgtggtggtgcacacctgtagtcccagctactcaggaggctgaggcaggagaatcgcttgaaccttggaggtggaggttgcagtgagctgagattgcaccactgcactccagcctgggtgacagagcgagactctctcaaaaaaataaaaaaaataaaattatgtttactatgtcaagaaaaatggtggatactatgcaagatcatatgggtgattacagcaaatcgatggaacctataattaaatattaatagaaatgtaagacatgaaaaatgccaaaacagagatgatgaatgccttcagttggctaatcagtaggctctaaactgctgaaaagaaaatcagtacatcttgaagataagttaaaaaaattaccttaactgaaacacaacagaaaaaaatgaagggaaaacaaaatcaacccagaacgtaatatacaaaagctgtgggacagtatctgtgtaaaatatgcacaactagaatcctagaaggagaagagaaagataatgggcagaagaaatattcgaagagataatggcttagagttttccaaaactaatgacagacacaaaaccacagataaaagaaactcagagaacatcaagcaaagctaggtgaggtgggtcacacctgtaaccccagcactttggttggctgaggtgggaggatagcttaaacttaggagttcaagaccagcctgggcaatgcagtgagaccccctctgaaaaaaaaaaattagctggacatggtgtgtggcttgtagtcccagctactcaggaggctgaggtgggaggattgcttgagcccaggagggttgaggctgcagt[131 bp omitted]gccgaggcaagcagatcacttgaggccaggagcttgaaaccagcctggaaaacatggagaaaccctatctctactaaaaacacaaaaattagctaagcatggtggtgcacgcctgtaatcccagctactagggaggctgagacacaagaatcgtgtgaaccttggagatggaggttgtagtgagctgagatcgagccactgcactccagcccaggtgacagagtgggactctgtctcaaaagaaaaaaaaaaatcaaggctgggcccagtggctcatgcctgtaatcccagcactttgggaggctgaggcaggtggatcacaaggtcaggagttcaagaccagcctgaccaacctggtgaaaccctgtctctactaaaaatacaaaaattagctgggtgtggtggtgcgcacctgtaatcccagctactcaggagggtgaggcaggagaatcacttgaacccgggaggcagaggttgcagtgagtcgagatcatgccactgcactccagcctgggcaacagagtgaaactctgtctcaaaaaaaaaaaaaagaaagaaaggaaaaagaaaaaaaaaaatcagagcacaccaagcaaggtaaataccaaccacaccacacctaagaaaaagaagtttcctggccaggcacggtggctcacggctataatcccagcactttgggaggctgaggtgggcagatcaccaggtcaggagttcaagaccagcctggctaacatggtgaaaccccatttctactaaaaataaaaaaaaatgagctaggtgtggtggcgcacgcctgtaatcccagctactcaggaggctgaggcagaagaatcatttaaacccaggaggcggaggttgcagtgagctgagatcgcagtattgcactccagcctgggcaacaagagtgaaactctgtctcaaaaaaaaaaaaaaaaaagaaaaaagtttcctcctagttggttacactggtgaattctactaaacagttaaagaataaggccaggcagggtggctcatgcctgtaatcccagcaatttgggaggcgaaggtgggtggatcacatgaggtcaggagtttgagaccagcctggccaacatggtaaaaccttgtctctactaaaaatacaaaaattagctgcgcgtggtggcaggtgcctgtaatcccagctactcggaaggctgagacaggagaatcgcttcaacctgggaggtggaggttccagtgagccgagataaaaaaaaagtaataataaataaataccaccaattctacaccctcttttccagaaaatagaacactcattttatgaggtcagcattactctgacaccaaatcagatgacgacagaaaatttcagaccaggatcgctctgaatatagatggaaaagttctggcaaaatattagcaaaacaaataccattacacacctattagaatggctaaaaaatggctggttagctcagttggttagaagaaaaaccaaaaagaatggctaaaaaacttctggcagtgccaaatatttgtgagatgccactggaactctcatgtgctactgatgggaatgcagaatggtatgtcactgtggaggttgggcagcgtctcagtaaagactctacttaccatatgactcagtgcaatgagtgctgacaccaaccacccggagttaggtcaaactgtacaggttatgggcaaagtcttccacaagactgccctcattccagacacaagctccaagttccgggatcctgaggccaccctcacttctgatcagctgattacaaatttgggcgtatttgctatcctactcatgtttaataattgactagaacaactcacagaactcagaaatgcacttatgatcagagtttcattatgacaaaaggttacaaataaagccagctaaagggagagatacatagggtgaggcctgggagaggcccaaatgtgaaggccccttgacttcaggacaacttactctccaggcacactgatatatatatatataaatataaatatatatatatttatatttatatatatttatatatatataaatacatatgtaaatatatatatatatatatataaatacagagtactgtcaaccagggaaactcactcaagctttagtgtccagttttgagacggagtttcactctttttgcccaggctggagtgcgatggcacaatcttggttcacggcaacctccacctcccgggttcaagtgattcttctgcctcagtctcccaagtagttgggattacaggcatgcgccaccacgcctggctagttttgtatttttagtaaagatagggtttct[141 bp omitted]taacaatcattggcaatgagttgaactgggctatcacatggttcagagctccaactgtctaatgacacccacagcatttctggtgtagccagccccgatcctgagtcatctcattagcatacactagcaaggcccaccataaataactcctaacacttgaggaatgccaaggatttagagggcacttcccaggaactaggacaaaggccagacaaattctctattgcacacccagcaatcctgtccctaggcatatatggtttggctgtgtccccacccaaatctcatcttgaattcccacatatcatgggagggacccagtgggaggtaattgaatcatgggggcaagactttcctgtgctgtttttgtaatactgaataagcctcatgagatctgatggttttataagggggagtttccctgcacaagctctcgtctgccaccacatgagatgtgccttttaccttttgccatgattgtgaggcctccccagccacgtggaactgtaagtccaataaacctctttcttttgtaaaatgcccagtctcgggtatatctttatcagcagcatgaaaacagactaatacagcatgtaacactctagagaataaaagcttacactcacacaaaaatctgtacccaaacgtttacaagagtctaatcaccctaaactagaaataacccaaatgggcaaatgaatgaacagtggtatatccacacagtggactactactgctcagcaataaaaaagaaggaggtgctgattcacacaagatgagtgaaacttaactgcactttgcgaagcgagaggtcaaactgtgatcccgtttacatgactctggaaaagcaaaaactaaaagggcagagaacagatcagatcagatcagatcagcggtagccaggagctgtggggaaggggggtggttacctataaagggccagcacaggggaatcttgggggtgactgaaatgttctgtatagtattgtggtggcggatacaagacatttgttgaaacccacagaactgtatgccagaaagactgaattttaatgtatgtaaatttacaaattaaccaggatatgtgggggaggacagaatgtagaccataacagatgaacctgttacaccaacgaagcacaaaatcacaatgaagggattttgtgaaagaacagaactaatgtaattttgaacctaaatatctttgaaaaaaatgttatgacacaatactgaaaagctaaagactaaaagaactgtatacaagcactgtattttaggtggtaaatctgttttttgtagggcatagcctggaatccacaggaggccaacggttctgaagctacttgtatattagggttgaacaagtacatacatatattgtagctaatgagagctaggcttctgtcagagaaaggcattataaataagagggaaggccagaatgaggcctctggagctgaactgttaccaatatagactcacagtcatagtgacacacacacacagatatgtacagaaatacacataaatgtgtgtatttgcatgagttaactatacagtcagccctctattatctttggtttctgcatccatggagtcaaccaacaatagacagaatttatttttaaaaaataataaaaaaaatagcacaataatttacatagcatttacattgtattaggtattacaggtaatccagagatgatttaaagtatctgggagatcaggcgtggtggctcacacctgtagtcccagctacctgagaggctgaggtgggaggattgcttgagcctaagacttcatagctgcagtaagctatgcacagctgcaccctagcctgggcaacagaatgagaccgtctcaaaacccaaaacaaagtatccaggaggatgtgcacaggttatatgcaaacactataccgttttatataggggacttgagcatctgtggactttggtatccacagggagtcttggaaccaatccctcacagatgctaaggaacagctgtctatatacattttctttctttctttttttttttttttgagacagagtttcgctcttgttgcccaggctggagtgcaaatggcacgatctcggctcactgcaacctccgcctcacgggtttaagcgattctcctgcctcagcctcctgagtagctgggattacaggcatgcgccatcacagccagctaattttgtatttttagtacagatggggtttctccatgttggtcaggttggtctcgaactcccgacctcaggtgatccacctgcctcagcctcccaaagtactgggattacaggcatgagccactgtgcccggccatacattttcttttttttgagacagtgtctcactctgtcacgcaggctgaagtgcagtagcacgattttggctcactgcaacctctacctcccaagctcaagtgatcctcccacctcagcctcccaagtagccgggaccacaggtgtgcaccaccacacccagccaatttacattttctatctatccattgagtgggactagaagcagtgacagtctaataataataaatatgtggcatccaaatctttgtttctagatagcattctccaataaaaagaaccatggttccttaggaagtggttaattccatggctggggtaggcatcttgtgatgtcagaaagcaaagaaatgcttaaaaaaaaaaaaaaagaagaatgagacatatgaaaagggcacaggagccaatctggaagagtttccaatggctaaaattagaacaagccaagctacaaaatattaacagtattgagtcataactcaaaaataaatatccatcatatatagatatataaagtagctgatataaataagtagctgaaattacaaaaatggggaagaagggacttttcctcacagcattctaacaaaaaacatagaagaaattagtgaattagaaaagtaccattaaaacattacagtaataattcccataggcaagatcgactactaggtgctaaaattcgtaagcaagagttttggctgggcgcagtggcacatgcctctatcgcagcacttttggaggctgagacgggagggtcacttgaacccaagaactcaagaactccatctctataaaaaatacaaaaattatcccagtgtgactgcgcatgcctgtagtcccagctacttaggaggctgaagtgggaggatcgcttaagcccagggggttgaggctgtatgagccaacatcgcaccactacagcatgggtaacaaagccagaccctgtcttccaaaaaaaaataataataataattaatagaaacaaggtatctgcatagtttcaaagtatctgccccaaatatttagtaattacaaagggggaaaacgtaaatctatagtaggaaatcctcacagacaccatcttaaccaagtaatctcaaggttaagttcaccaataa[134 bp omitted]ctactaaaatacaaaaattagccgggcgtggtggtgcatgcctgtaatcccagctatttgggaggctgaagcaggagaatggcttgaatcagggaggcagaggttgcagtcagctgagatcatgccactgcactccagcctggccgacagagtgagaacctgtctcaaaaaaaaaaaaaaaaaaatcagtatcaggccagcatcgcacctgcaatctagcctgcaatcaacctaccactttgggaggctgaggcagggggatcactttgagctcaggagttggaggccagcctggagtgaaaccccatctccacaaaaaatagaaaaattagccaggtgtgttggtggacacctactcaggaggcttaggtgggaggatcacttgagcctgggaagcagaggctgcagtgagccaagctggtgccactgcattctagcctgagcaacagagtgagactccatcaaaaaaaaaaaaaaagtatatatatatgtgtgtgtgtgtgtgtgtgtgtgtgtgtatgtatgtatatatatgtatatttatatatcaacatcatatcccccctgatgtgatgcactaagggccttcccaataatgcataacctcaatttaatataggaaagcatctgtcaaacccaaataagaagaacatttaataaaataacacatcctcttcaaaaatatcaaggtcatgaaagcaaggaaaggcggaagagctgtcatatactgaaggatcctgaggaaacatggtaacaaaatacaatgtgggatcctagaccggatcctagaacagaaaaagaacatttgtgaaataactggtgcgatctgaacaaattctgtagtttggtaaacaatattgcaaccaggattaacttcttagttttgatcactgttctgtgattatgtaaggcattaacaaaaggagaagctgggcagagggtatacggaaactcttgcacaattttttcaactcttttgcaaacctgaaattatctcaaaattaaaagctaaaaaaaaagaataatctttaggttttaaattattaggtatcagaatgttgggtctgctgcaagtgagataaagtggaaaaggcactagaccagcagttcaccccatccctgccagtggttttgaacctgaagagaatcatacaacctccctgaacctaaggctccatggccaaacaggtttgatacacaactcatctacctcaaaggttacttaaagatcaatgacacaagtagttaaagttgtccagaaaggacacgttcacagacaacacaagcattaatgtatctctagccctaagaaaactctattcaggagagattttccaggaatgaacttgagataaaatactaaatacagaagcaaggtaacagcagactgttcttcagcaaaaaaggaaaggttacaaaaataaaaataaaaaaacatgctgagggctctatcagggtacagaaagagcaagaaagtaggacaagcagagagtggagcaactggttcttctcctgtgcctcttccttccctctctgctacctaaaatttagcatagcagactacatcaaggaagagggaaaacagcggtgttcccgacatcaccaaggaactcagagcagctttagtatataaggtggcttggaaacgagggggaaactactttcctgtcctaaaagcaaacaggtctgaactaaaagctatcatctctgaagaaatcttttggcctttcaggtttattctaattttagaatgactgggatcgatgctaggcatcactcctcgccattagactaaacacaaactaatcaaatgtttggatcttctctacactactaatgaggcaatgagtagaaaagaaggggtttctggtcccaatttaataaacagcagaggcatattttctcaagttgattttattaacaaaaagtgcaaactattttgaacaaaagtaaactatgagtcacagcattcagcaagacatcagacacggaagagtgaacaatattcactaagtaaaatacagcagatgagatgtctctcacatgtatatttaattattcatgctttttcaatagtctcttagtcaactttcagtgtaatttccacaaatatatagcagctcaaacacaaatgcaggagcacaatggcaaagtttggcaactgttttgggctaattatgagtatgaaagaaaaccttatatcacagtttcacgttcatgtaagccactgtgcaacatgaatgaatctttaaatgtgttgacactgaaatcaatgtacaactaatgaaaataaagaagaaaagggggctttaaaatatttgttgcactacagtcgtatagtaagaggcagaaaaaaatgaaagaattttaaataatcttacacgtgtctacagggccaggaacgtaatgaatccatgttaacttaatttcatttaaaattacatttgtagaagtcacacaacagaaagataccatgcggttgaacagtgtgcctgtacttgaacaagtgagagaagatacatactccaaaaaggagattcagtctagtgttacttcagttattcacatagtgtctacagggcagaatctcttccaaagcaattttctgttcactaatctacaggcactaatggaactgtaattaaaaccccaaatataaagatgattatttaaacacaactaagctctagccaaagacagtagagcaccaatgccgggcgggttactgacggcatgcagggcctggaggtacattttctggcagttaaccagccttctgctgtagtagacaaactgccttttgtgaatgtacaaatttgctaaattaatagagaactacattgttatttccttacattacaaagaactcttcccatactgtttttcccatgtactactgctgtcttagactaaactgtgccaccttccaacagtttccaaattactatttcaggtcgagataatgaagaaataagaccaaatctgattatctgactgatgacaaatttgagcaccaactacagcaaaattcagggtcaaggtagcttgcaagtcagttctcttgatttggcaattaccttccactattttcatctgtattgaagctgagatcttcagggcctatttgttcaccatcaggaaaactggaatgtgtatctatgattaaaaaataaataaaaaatttaaaatttaaaagcatataacaagggcagtattttccttcccaagtctttaaataatcttaccaaatgtgttatttaagtgataaagatgtgctgggttgtgaacaaatctctgtcttcagagaatttgtgatctgagtcaggtataagcaaacacaaaggaaaaataaaggagaaaaaaacaaaatgtgtaatagacacccacaattaaaagatgacaggaattgtctcattttgtcctcctggggacaatctggggacagcttaaaaagggaacaagaagcaatggtgtatattctcaagattcaagaccttataaacataaaacatatttcaaagccaattaaactacgcattcaagtatcactacaaaaacccaccagcactccaaataacttgcacaaaatttggatgcttattttagaagcagaggaagttactaaagatgccttaatacttacaaatcatcaaatgcttggttctgtattgaaaaagataccagagcaccaggaaaatatgcaaaatataaagcagaaaatggcataggcttaacaatgttgtcactccaggatatcttgcagaggaatgttcagattgattattaaggcctctgggtaactttaaatgtgtatttctctaacttgacagtatatccttttactgattaatctgtattccagaaaactgcttgacagcagaatacttatggtatatccacatgatagaatattaggttgccataaaaaatgaagtttatgaaattttaaataacatacaaatatatttaagtgaaaaaagcagaataaaaaactatttataaaatatttaggtagggctggcatggtagctcacacctgtaaccccagtactttgggaggccaaggtgggcagatcacctgaggtcaggagttcgagaccaggctggccaacatggtgaaaccctgtctctactaaaaattacaaaaactagctggatgtggtggcacatgcctgtagtcccagctattcaggaggctgaggtgggagaattgcttgaacccaggaggcagaagttgcagtgagctgagattgtgccactgcacttcagcttgggagacagagcaagactctgtctaaaaaaaaaagaagaagaaatgcaatgcaaataagacagaagaaaacaagggaaaatattaatagtaggtttctcttgtttttttcctaataacttttttgggggtaggagggaataaaaattatttcataatctgcatgtatttctaagttatttttattttaaaaggttaaagttatcttacagtaggctagaaaaggaaaaaaaacccaaacatctgaaatctccccagggattggcaatcatttcctatgaagggtaaatatttaggcattgtaggccacaaatggactctcttgaaaattcttctttgggctgggcacggtggctcacgcctgtaataccaggactttgggaggccaaggcaggtggatcacgaggtcaagagttcgagaccagcctggccaacatggtgaaactccatctctactaaaaatacaaaaacattagccaggcgtggtggtgtatacctgtaatcccagctactcaggaggctgaggcaggagaatcgcttgaacccaggaggcggaggttgcagtgagccaagatcacgccacagcactccatcctgggtgacagaacaagactccatctcggggcaaaaaaaaaaaaaaagaaaaaaaaaacccacaaagaaaattcttctttgtttcttttgcttggtttttaaagactctttacaaagtaaaaaccattctcaggtcacagactatacaaaagcaggttgtggaccccgtctctgcccagtaagtagcactcattaggtgcaaccaagccaaatattactggctgtgtttttttagtactcaccataatagttaaccaaagaatgttgtctcacaaatgacaataattaaaaaaaaaaaaaaagaagtagaagcagaagaagcaaaagcagtagagcggaaaaagtagaagtagcagcagcagaagaagaagaaagagaagcggcagcggtggttttagtaatctgtgtaaaatgacatcatgtgctgcaccttcatccgggggctgtgtcatgaccatgaaggagtcgtgaaacccgcccacactggtatgctcttcctgctcctcattctcagtgtcacattcaatgtcactgtcgctactcattcctggcaggaaggaaggagaacatgtttctgaaaagaaaccactgtaagtaaaaggaaacagaaatctccgtatctgctaaactgagattcctattgaattttacatggaatgccaagaattcaacaaactaaacactaacaaaacaaagacaaaagtaaccgcacaaacctcgattctctttagctatttagagtggttttatttctgttctcaaagtttaaaattgccctttccatagtacctgaaagttattatttgaaaccagcattaattttattatactgataatacttttttccaaatcaaacactgtttttttttcagtcacaagagataacaggaactcttttaatcctgattcattatagacataattatattccctagcctaaaacataaatataaatgtgttatacaaatccacatggtgtatgaatattagaaattctggcaattctaataatagtttgtattctaattgggcatctaatttttttgtgtatgtcggttgatttgtatttatttttattttttgagagacagggtctcgctctgtcaccctaggctgggctgcagtggcctgatcatagctcactgcagcctcaaactcctaagctcaagggatacttccgccttagcctcccaagtagataggtccacaggtacatgacaccatgccctgctaatttaaaaattttttggagggacagggtcttgctataatatgttgcccaggctggtcttgaaatcctgggcttgagaagagatcctcccactttagcctcttacagtgctgggattacaggtcactgtgcctggccacatcagttgatttttaaaagaataattctataaaaagtatttgtttcagcaagatagcaatcaagaaaacctgaaaatctttctgctacaaatccttacaaatagcaagataaaatataaatgtaaaacattattttaatgaacaagcacattaaaaggcagaaaggaaatccacagtgtcagaaacaaagaaagataaggaactttcattagtgggtcagggaccacagttgccctggagagcttcctgtgaggatttttaaacactgccttgggatagaaaaatgaaccccccacagaaagggaattaaaagtgagactaaaactccaccccctgcataatgttaaaatttttgtttgttttcttgagacagggtctcactctgttacccaggctggagtacagtggtgcaatcatggcttaccacagccttgacctcccagggctcagatgatcctcccacctcagcctcccaacaggcctgtgccatcacacctggctaatttttgtaatttgttagtagacatgggatttcgccatgttgcccagactggtcttcaactcctgagctgaagtgattcacccgctttggcctcctaaagtggtggcattacaggcatgagccaccatgcctggccaatgctaaaattcctattgaaagaacagactagaaaaatgtctgcctactggcataggaaaacagcaaggaattttgtctgtttctactgggctctgaagagggggaaaaaagtcttacctcaaaattcaaagtaagatttatgtgcctaatttcggtttgggatttaaggttgaggttcaaattttaagaaattaacataaaaattgttcaggagctagtgttatttgaataaagcaaaagtaaaatcctctctggaaggaaggttctaggtacaatggagcaagcacattccactctatcttttccactgaaagtagcaataaaacctggagagatgggtagtgtagttatttaaggatattcatagttatttactttgaaaagtaaatagaaacaggcatactgatgaagactgaatttgaatgacagcaaaactggcagattaaaacaagacccagagtcttattaaaaaaaaaaaaaaaaacctaatgaaaatgttcaggatacaaccccaaattattcagcatatgaaaaaccaggaaagacaaccaacaaacatcaatgatgagatgacacagatgtctggaattatttaagggctttaaagctagataaaatgctcatcagccaggcctggtggcacatgcctgtagtcccagctacttgaaaggctgaggcaggaggatcgcttgagcccaggagtttgggactagcctgggcaacttagcaaagccccatctctataaaaaaaaaaaaaaaaaaaaaaaatttaaaaattagccaggcacacattggtgtgcacctgtaattgtcctagctactagggaggctgaggagggaggcccacttgagcccaggagttcaagcctgcagtgagctatgattgtaccactgtactccagcctaggtaacagaacacaagaccctgagggacagaggaaggaaggaagaattaagaatgaaggggataaagggactggtctaaattgtgtcaaatagaatgccatagagatagcaaaaataacaaaggagagacaatagataaaaggaaaaaagttgaaaattttgtagaattataaaaaacattctgaattaaatacaaataaaacatatcaaaatttgtgggatgtgactatagcagtgcttaaaaggaaaggtatgacattatttatattagaagagaaaatatctcaaatcaataatctaaactactactttaagaaactagaaaaaggaaattaaactcaaagcaagtaaaaggaaggaaataataaaaaacataataaaatcagcagaaaaacaaaaaaaccacaatgaaacaaaatggtgtttctttgaaaagatcgataaagttaaaaaagcctctaggtagattcactaacaaaaagagagcaaacaaaatttccaatatcaggaatgaaagaggacatcaactacaggttctataaacagtaaaatataataaaatgctatcagtaactgtatgctcatgaaaccaaaaacagatgaaatgagcaaattctttcctaggtacaaactaccaaaggttactcaaggaaaaatcgatgggtattttaactcttaaagaaataaaatctgctctagtttaaaaagcttccaacaaaggcaactgtggccccacatggcttcagtggtacactcttccttttctctttttaagaagagtttggttagcattatttcagccttaaatatttagaaatcgtctccatcttcagcaaaacaaaaaaacaaaaaaacaaactttcctgttctaaaagagtgaagagtttacaacaattttatgaagtaggggaaaaagaaaaagagcagagacggttaaagaggccaaaactagctagttctgtgaagcaccacctccaccttgtggcccttcatggaactgttgctgaaaacactaaaacacactgagttgaacttcaaggcacaaatttgacctcttattagtagtgtttctgaattcccgacaaataccaaccttcaggattcaaaaacaatgaattggaattctctggaattccccaaatctacattattcttttaaaaaagttattaaatacatttttcaaactctattcattacatgtgtatcttttttttttgagacggcgtctcactctgtcacccaggttggcgtgccactgcgtgatctcagcctactgcaacctccacctcccaggttcaagcaattctcctgtctcagcctcccaagtagctgggattacaggcatgtgccaccacacccagctaatttttttgtatttttagtagagatgtgtttcaccatactggccaagctggtctcgaactcctgaccttgtgatctacccgcttcggcctcccaaagtgctgggattataggtgtgagccaccgcatccagcctacatgtgtatctttaaaacaaatcatttaattagtatttgtaagagctgaggcctatagtgaatattcaaatgctagactgcatgtgggtattactgggtagtatgtgaataatgtcacgtttagaactcagcaaggtttacagtactatgcagaatcacatgttaataaaaatgccaatataaggattttgcttcaaaatctttcttggaacaccaatcaatttttattaagtataccatgtgtaaactcattattatttacttagcagcagacagggccatgaacacacataaaacggcgatatttataatgaggactgatttgtaatcacttctttccaaggagctcctgttgaccttaacctttgattccaggtatcagtatttccagtttttactttcaacttgccctaagtagattccttcaaatcagtaatgtttctgtgttgttaaaattaattctaataagacaattagaataatgttttccatttattaaacttcttgactaatttttttcagaattcaaaaaaaacacacatttcccaagaaatgctaggaagaaattcctgcatgaaaacgcctggtcttttatcaagcactaagatctggaagtttcctacctttgtgaatgtaaagaaaaagacaaatggctggacgtcaatgatagcaattacaagatactattaattgtaaggagcttcagagattgttaacgcaaaagaaatctgcatcttattactctgtcaatcatctaccatattttttgagcacctactatgtatgtgctcagtaaagctaacttgagttataactcccttaaatcaagttgctcgaatttcagatgctatggaaaatacattaaccacctggtacagatgacactttatattctagtcaccaacaatttatctgcctttctcctttcgaagaggaccctgatattgttcaggtattttcccttaccacatatccatgtggaacgagttggtgagggagaccaactaactggacttggctggctgggtgcgcggtggctcatgcctataatcccagcactttgggtggccaaggcaggcagattgcccgaggtcaggagttcgagaccagcctggctaacatggcaaaaccccgtctctactaaaaatacaaaaattagccgggcatggcagcagatgcctgtaatcccagctacttgggaggctgaggcaggagaatcgcttgaacctgggaggtggaggtaacagtgagtcaagattgcaccactgcactccagcctgggcgacagagcaacactctgtctccaaaaaataaataaataaataaataaataactggacttggccactttccttgacagtggctgacgagatagaagaggaagttgttgaggtgcttagagaaaggttgttgctggagatatatagaataaatcaatcctcttccactcccagaatgctgttctgactctgatgtctagaactgcagcaaacatcttaccgccctgagaagagctaagcctctcactcagaatagcagggcaaaagataaaacaaccccacccccaccctccaacacacacacacacacacacacacacacacacacacacacacacacactaaaaccaccccacccccacccacccacacacacacacacgttcctgatgacactgagcagctgaattttctaatcctgaaaactgctctaccacaggtgtaccttcttattgagagatttgttaatgtaaaagagttaattttcctttttgttcaagtcagttaatttttcgatgaattttgttaaaggcatcttaataattaccctaaatgatcagcaatggcaggccatcaggctttgtattcctcttaaagaggccaccagcaaggtttttaacaggcatgccaaggcttttccccagatggtgttttgagtacccctgatttaactgaagggggtatgtgctacttcagcaagaagtcagagagcaaagcctttagttttacaaagaacaagaaataaactggcctacctacagttgtgcaggtcatcaattgaaagaaaaaataagtcaaccttttcagcatcagatcattaaaccagcgactaatacaaccaaaggttgtcccatatggttccagtaaaaaggaaaaggcctatttatgttcatatctaagaaaaaagttatttttaaactgatgcttaagagcaattaagagacactttagtagtcccaaattcccagccagtaccacaaacaacgccttaaagtcctccagacaaccttctctttgagaaagagagagaaccccacagtgatatgacaccgaatgtcttctttttgtattcagctaaaataaagagtcttgtttttcctaagcatggatacaagacaaatccattcaactgtctactaaggcttataggtatataagggtttcctgagaacttgctcttgctgatgatagaataatactggcaacagtgagcaaggccgcactctcctcgagaaacaaagctgattacaggaggcacagggcttcctttgtctcctgtactaccttctctcagcctcatcagttagtctccttctcacagtctatcctgggactctggaggtaaacaagctgttcagataccaacaaattacaagggtgtacttctgtgtccctgttgatttgcacattcacagcaatttttcttattgagttctaggtgctatttatagcacaacaccccacatataaagataaaatgtgttactgaataacactgaccatttaactctaaatcctacatgaataactccattctttcaaagacttggaaaatgtaccgatcttcactatggccaagcaaatgcctttcttcagtttaggacaagctgtcaattagctttaaataagaaatgaaactggtgtcaaaaagttccagtgttttctgtgctgaccagccattttatatataaaaattagtgctgagataatgtaaattgataaattggaggctgaaattaagtccaaatcgggcggccgggtgtggtggctcatgtctgtaacccagcactttgggaagctgaggcagaaggatcatttgagcccaggagtttaagaccagtctgagcatacagcaagaccaagtctctataaaaaattaaaaataaagaagtccaaatcatttcacctaaccatgcttcttaccaattttcctgcctctagttccacatatgctattcccacccccaaatccattctccagaatgcagctagagtagaaatgttaaagtgtcacttctaacttagatcctattcaaatgacaaagttcaaattctagctgggacattccacgtaactcttcatgatctggcctctggtctgtctcccttctggcctttcaccagtcttcatctggctaactcctactcatcccttaggatgatctttccaagggtggattagggactaggttagcagagagaggcgacagttaagagcactggctctaggttcaaattctagctcttccaagttcttttttttcttttcttcttttttttgagacagagtctcgctctgtcacccaggctggagtgcaatggccacaatctcagctcattgcaacctctgcctccttggttcaagtgattctcctgcctcagcctctcgagtagctgggattataggagtgtgccaccatgcctggctgatttttctatttttagtagagatggggtttcaccatgttggccaggctggtctcaaactcctgacctcaggtgatctgcccacctcggccttcccaaagtgctgggattacaggcattagccaacatgcccaaccttccaatttcttttctttttttttttttttttttgagacgaagtttcactcttgttgcccaggctggagcgcaatggtgcgatctcagctcactgtaacctccgcctcccgggttcaagcgattctcctgcctcagcctcccaagtagatgggattacaggtgcccgccaccacactcagctaatttttgtatatttagtaaagatggggtttcaccatgttgaccaggctggtcttgaacttctgaactcaggtgatccaccctccttggcctcccaaagtgttgggactacaggcatgagccactgcgcccggccctggccttccaatttctaaccctgtgactttgggtaaggtaaattacatctccaggcctcagcttactcacctgtaaaactaggttaacaaaagcaactaccatgtagagttattctgagaataacagaatactggtaaagtctttaacacagtaagaacttagtattactattatttttattacgtatctcatttttgagctgcctataaaccttatcacagcactcatcgtcctatattacaactggctattagtctcccctgacacctaacaattggttttcaactgctctccttgccgccctcctaccaataccaccacacatacctagcatacctgagagctacaacttatttctattaataactgtggcccactctggcaagtgattctcaaggagtggtcacctctggttgagaattatttagttcaactattggttcttgactggggatgattttgcctcccaggaaacatgtggcaatgactagagacatttttggttgttgtaaccggagggaaacactactggtatctagtggttaacagctgaggatgctgctaaacattccacagtgcagagaacagtccctgtaaaataaagaattatgtggcctaaatggcaatggtgcaaaggtggagaaagtctgaactagatagtaagttcaggaattttatcactggcatcaaatgcaacatccggtaaattagaagcatttcataaatgttgcatgaaaaaaatgagcttgttattactgtcatttgagatagagtctcactctgtcgtccaggctggagtgcagtggcgtgatctcagctcactgcaacctctgcctcccagttcaagcaattctcctgcctcagcctcccaagtagctgggattacaggtgtctgctaccacatctggctaatatttctatatttagtagagatgaggtgtcactatgtttgccaggctggtctcgaactcctgacttcaagtgatccgcctgcctcagcctcccaaagtactgggattacaggcatgagccactgcgcttggtggaagaaaaatgagcttgtaattccagcatattctgtagtaatttaagctactacaatccagtatgtatggagacacatagaaagtaactattccccggccggccttggtggctcacgcctgtaatcctagcactttgggaggctgaggcgagtggttcacgaggtcaggagttcaagaccagcctggccaacacagtgaaatcccgtctcttactaaaaatacaaaaattagccaggtgtgttggcaagcgcctgtaatcccagctatgcagaggctgaggcaggagaatcgcttgaacccgggagttggaggctgcagtgagccaagactgtgccactgcactccagactgggcaacagagctagactccgtctcggggaaaaaaaaaaaacaacagaaaaagaaagtattccccacaggcccattctataaagatcttcaatcataatatttctttcttgatgttttaacaataaacacatcatttacaaaaatcttttctatttaatctcttctactgaaataatgctgcccatcacagaagcaccaattaagaaaaccaaaatatttagtgttctttaactgagaaacctgaaaatgccaccacctacacaccctcttcttagggcagctgagtagatgctggcacctgtatgtatgctttgagctacaattcatcaatcattgaaattcaaatgagtgcagaggtggaaggtggtggagtttcactaagaaatgaaaaaattacaaggccaaatatcattaagagagttgacattcttttctaccaatttataaaggacacagcaagggcaatacacatagccttgttctaagcacctctgttgccccaaattgcaaaatgtcttctatgcttttagataaacaataatgaacttggaagaacatgcaaaagaaacactagaaagtacagctgagaacaagctgaagtcagtcatcatacaggatttaaaaaatggtcaaaacttggaatgcttctttaagaagaataaagcaatctacagacactaattaagactgactttaaaaaatacttaacatttactattctaattagttgttctagggcatatcttccccattagattgtgaacatatctaattcaactttgtattaataaatctagcaaaaattcgatgcctggtatgtaggtgccttaacatatttattgaccgaacagatgaactatatgcagattttttccccatacaaatgcctgttctagtaaggcctgtccttttatatagtaacttacccattttgccttcctctgtatttggtatcttagcaaatcaaattcagtggcacaaggaatgttgtgttcagatcaagcatgtcgaatagcagatctcagtaacatttccattaaaccaaccactccctatccctatcactaccaccagcagcagcagcaccaccaccaccaccaccaccaccaccacccaccacccaccaccaaaaaagggacagaattctcatttcctgcttacttataagtttatcattccttaccttcttcaggggcagctgaagctccttcaggtagtacaggctgtaactctccagtttcagaattattttccaaatcagtcatctgcagtccttccagatgacctcctttagcattagccctcaaagaagaaaacaacttgatatttctctataactagtgacacaataatctatattttctttttgaactgagcaccaaactaagtagggtacgtgctctggtgcttaatactaaatttcaaattttatctgaaaatatttcactaaggtcctggcacagtggcttatgcctgtaatcccagcactttgggaggccaaggtgggtggatcacctgaggtaggagttcaagaccagcctggccaagatggtgaaaccccatctccactaaaaatacaaaaattagccagatatggtggtgggcgcctgtaatcccagctactcgggaggctgaggcagagaatttcttgaacccgggacgtggaggttgcagtgagccgaggttgcaccattgcactccagcctgggcaacagagtgagactctgtctcaaaaaaaaaaaaaatttttttttcactaaatattcacaaaaaaatgttatgaaatggtggattacatcaatgttggtatcctggttgtgatattgtactacagttttgcaaaatgttatcattaggggagaaaaatacacaggatctctctgcattatttcttacaactgaatgtgaacctataattagctcaataaaattttaacttataaataccaatagaagttttaaataatatgttctaatagggaaagacttttgagatatattattattgctattatttgagatagagtctcactctgtcacccaggctagagtgcagtgatgtgatctcagctcactgcaaccgctgcctcctgggctcaagcgattctcctgcctcagcctcccaagtagctgggattacaggtgtccagcaccacgcccggcaatttttgtactttgtttttagtagagacagtgtttcaccatgatggccaggctggctcgaactcctgatctcaagtgatctgcccacctcagcttcccaaagtgctggggttacaggtgtgagccaccgtgcctggcctgagagatattattgaatgagaaaataaagtacatcttctgtattaaaaaagctacatagtcacagttccttaaatatacacaaaaactgagaagacacagcacacatgaaaaattaataacagcatgaatatgtgtgggcagggggttggaaaactaggtcatgggagttaaggatgggaaatttttcacttattcttttctcctttcattttgaaacacttatcattagtatttaatatttatttttatttaaaaaataaacagaggcaaggtcttgctatgttgcctagggtgttctcaaactcctgggctcaggccatcttcccacctcagcctccaaaagtgctgggattacaggtgtgtgccactgtgcccagcctttcattagtatttaaactttttgcttacactactttaaatcaggcaggaaaaaaaaagacatgagctggacagcacctacatgaaccaggctggcagataaaatcaactgcaaaatgaggatcaagctgcacacacttgcacaggattttacactctagaaaaaaaaaaactaagttcatgtatatttaattgtggtgactaaaggcagataaaaatatctccatagcaaataaaatataagagctagttgcactttaatttgaagaaatgtataaaacatcaggttaggtagtacgtagggaagacaagataatctccagtgattttaacacctttctactactgaaacttgagccagaaagctaaaccaccagctgatcttgtagttttggtaatgagccagaccttgactatataaaattaagtaaacttaaagggtgttaatctttctccaatttaggtaaaattcttttcagggtctccaaaatagaactatttcattgtttaaatttagaaataggtttaatatccataaaatagataagcagatggatattaatggctaatcatctgccacatccatagccaatatccataatcactctatcttttgaatagatggaagtttaattgccatgccggggatttgagtttatgtctcctaggggagagataaacgtgttaactactatatatctttttgggaaattccaactataagttttgaggatactttgataacaggagagaagaaagatgagataaaagcagaaaagcagtgttaaagttgctgtaagtgctttgtttcatacaaaatatatataaatgcctgtgacacataatatagcccaacactaacatctttgacaagtgtaggatagactgaaaaaaaaaaaaaaggctgaccgcccccctaccgccaacacatacaaatttacaaggcagagttcagataaggttacgtatcattgtgaaaatgagctctaacatatttaaactaaacttccggtactatttcatcccattaaaaaaagtactatctcttgagaccatggtgaaaccccatctctactaaaaataccaaaaaaaaaaaaaaatcagctgggcgtggtggtgggcgcctgtagtcctggctacttggagaggctgaggtaggagaatggcatgaacctgggaggcggagcgtgcagtgagctgagatcatgccactgcactccagcctgggcaacagagcgagactccatctcaaaaaaaaaaaaagtactatctcatcccattaaaaaaaaaaaagtaaaatctctgatactttaaaaaagttaaaatttaggccaggtgcagtggctcacgcctgtaatcccaacactctgggaggctgaggtgggcgtatcacttgaggtctcaggagttcaagaccagcctggccaacatggcaaaacctcgtctctactaaaaatacaaaaattagcagggtgtggtggcgggcacctgtaatcccagctacttgggaggctgaggcaggagaatcacttaaaccggggaggcagaggttgcagagagctgagatcacgccactgcactccagcctgggtgacagagcgaggctctgttaaaaaaaataaaaaaaattaaaaaagttaaaatttagtgcaataaatgtattttctgtccactaaaaaattaacaaggtagaaattaatttgttcatcatgatgcatacttaaagttccaaacaaagctattagctattataccattacatatacaaaacaacttaatttaccccaaggtgaccattttcctccttttctcaaccgcaggcaagccactgaaaactgcaaccacaacagcatctgaatccaaagctttacactgccggtcttcagtttttggcagaatatcaccgatactgccatgtatcaaggctcggggagaactgtgcctgctcccagactgagagcttcctggggagccttcaaaaaaaggaagatggaatacaaaaattagctgggcatggtggtgtgcgcctgtaatcccagctacttgggaggttgaaacacaaggatcacttgaacctgggaggcggaggttgcagtgagctgagattgtgctacactccagcctggacaacagagcaagactctgtctccaaaaaataaaataaaataaaataaaaggagggataatcagaaaaaaggcaaataaacatgaaaggtctctctcagttacattagaaaatctcactatatatatcattttaaaactacataaaaacttcaaaaataggccaggtgtggtggctcatgcctgtaatcctggcactctgggaggctaaggcggatggatcacctgaggtcaggagttcaagaccagcctggccaatgtggtgaaaccccatctctactacaaatacaaaaattagccaggcgtggtggcgtgcacttgtagtcccagttactcaggagactgaggcaggagaatcacttgaacacggcgggcggaggttgcggtgagccgagatcgcaccattgcactccagcctgggcaactagaggaaaaaactccatctcaaaaaaaaaaaaaaaaaaacttcaaaaataattttgaaacatatcccttgttttttatgccaagcatctaaaattaaggagtccaggccaagtgttgtggctcacacctgtaattttacactttgggaggctgagacaggaagattgtttgagcccaaaagttcaagaccagcctggacaatgtagcaaaaccctgtctcggcaaaaaaaaaaaaaaaaaaaaaaaaaaaaaaagccaggtatggctgcatgtgtctgtgtctgtggtcccagctacttgggaggctgaggtggaaggatcacttttgtctgggaggtcaaggctacagtgagctatgattgcaccactgcatccctagcctggaaaacagagcaagactctgtctcaggaaaacaacaaaaataaagaataaataaaattaaggtgtttagaatacatagtctaatggctgtattttgttaagggtctgttctgttgagatcaagaaactttccagccaggtgtggtggggctcattcctgtaatccgagcactttgggaggttgaggcaggcggattgcttgagctcaggagtttaagaccagcctgggcaacctgtctctacaaaaaatacaaaaattagctaggcgtagtggtgcacacctgtagtcccagctacttggtggggctgaggcaggaggatctcttaaaccaccggtcgaggccacggtgagccaagatcgcaccactgcactccagcctgggtgacaaagtgagaccctgtttcaaaaaaagaaactttcaaatccaactttagcatttttggtgcccttcaagatctaaagctccacgataacatcaatttcaggtaataaatatttaccccactaaaagtacattctgaatccctcaaatttaccttcagacagagtctgacagtctccctttgaacgactattttctccagggtccactgctcttcgaagtgatagactacctgctacactggatcgagctggcttgggcgaattactcttcttatttgtggctgcaaagacatttaagaacacctctgaataggctactacagcacaaaactcactatttagtctgtcagaaaaagttttaatcttaccttgcatggaagctgttctctctactgtctaaaaataaacaacattctgtagccccaattggtttagacttttgtcataaaacattcccatcttgttgcttgtagagcagaatcttttttttttttcccccagatggagtcttgctcttgttgcccaggctggagtgcaatggagcgatcttggctcactacaacctccacctcctgggttcaagcaattctcctgcctcagcctcccgagtagctcagattacaggcactcgccaccatgcccagctaatttttgtatttttagtagagacggggttttgtcatgttggccaggctgggtctcgaacacctgaactcaggtgatccacctgccgcggcctcccaaaatgctgggattacaggcatgggccaccgcacaccgcccgtaaaatcttaacttaaaagattatctgtgagctccttaagaaaaatcatacaaatttcaatgcagttaaactattaacaaatatataacccgtcaaacatttggaaattataaagtattattggattaaaaagaaaaatcaatgctgagttagaaacaaattacaattatggtacttgaaatcaaaatgtctgtggccaaaccagtagtgaaaagaaaatgtacggccttaaaatgaattaattagggaaaaaagggactatatgacctaatatgcatagattcaaaagctaggaagacaataaaaataagcaagcaagaatgctattgccagaaggcagggccctgcccttgaattcagcctgcagaactgtgagttaaataaatctcttttaaaaatacattttaaaaaaagaataaaaataaaattgtaaaaaacaataaaaataaaaaattcattaataggtaataaacaggtttagcatggttgcaggatataagacaaaataacttattgtatttctctgcactagcagacaatgtgagaatgaagttaagaaaacaatttcatttttaatagcataaaatacaattaaaatacttaggaatttatttaacaaaagaaatgtgagacttgtccactgaaaactaccacacattcttgaaagaaaatagagacaacagcaaagacatcctgtgttcatcactgattagaatacttaatactgttaacaaagcaatattcttaaaattgatctaccgattcaacacaatttctaaaataatagtagctgtgtttttttttttttgcagaaattgacaagctaatcctaaaatccatttgaaaatgtaagagacccacaatacccaaaacaatcttaaatggaacactcacttctgatttcaaaagttactataactaagtaatcaagactatgtggtactgccatatacacatatatatcatcaaaacagaattgagagtctagaaacaaacccttatatttatggtccactgatttttgacaaggatgccaagacaatgcaatgggcaaggaaaaaaagagggacaataagtgttgccaacggtatggaaaacctggagccctcatatactgctgctgggaatataaaatgatgcagctactttggaaaatagtctggcactggtagttcctcaaaaagttaaacacagttgccatgtaacccattaattccacttctaagcatatactcaaacaaaaccatatgtccaaacaaaaacttgtacatgaacgttcatagcagcactactgataatagccaaaaagtaaaaacaacccaaatatccatcaactaatgagtggataaacagtatgtagtacagccatacaataaaatatcatgcagacataaaaaggaatatatgccacaacatgaatgaaccttgaaagggctgtgttaagtgaaataagccagacatagaagacctcatatggtatgagtctatataaaaagtccaggctgggcgcagtggctcacatctgtaatcccagcactttgggaggctgaggtgggtggcgcatgaggtcaagagattgagaccaacctggccaacatggtgaaacctcgtctctactaaaaatacaaaagttagctgggcatggtggcgcacacctgtagtcccagctacttgggaggctgaggcaggagaatggcgtgaacccgggaagcggagcttgcagtgagccgagattgtgccactacgctccagcctgggtaacagggagagactccgtctcaaaaaaaaaaaagtccagaagaagaaaaatccatagggaaaaagtagattagtggttaccagaagatagtagaaggggaagatggggaacgacttttaatgggtttggagttctagggagagggttaatgaaaatgttcttagacttagataaatgttctagacttacgaaaaatgatgaccaatttctccactaaaaggataaatgaattattggttaaggaaaaaagaatgcattaacagtctgggtgcggtggctcatgccagtaatcccagcacttcaggaggccaaagtgggtggattacctgaggtcaggagttcgagaccagcctggccagcatggtgaaaccccatctctactaaaaatacaaaaattagcccggtgtggtggcacacacctgtaatcccagctactcaggaggctgaggtaggagaagtgcttgagcccaaga[146 bp omitted]caatggatgaaataaatctaagaacttggtctttgaggagatgaacaaaattagcaaatcccttgagcaggtcaaatcaaaggagaaaaaaaaacagaagtaagcaataaaataagtgaaaaagaagttaacaacccatatgcacaagaagttttaaaaatttaagaaaatagaataaatgactgtatatcaataaatttaaagacccaaatataattagtttttcttggaaaactatagtaactgacttaagtagcagcagaagtatgagaaaactacatctgacaagagattaatgaccaggatctcaaacaactctataggaaaaaattcaataatctgattaaaaatgggtaaaaatctgaatagatatttcttaaaagacgacacacaaatagcaaacaggcatatgaaaaagtgctcaacatcactgatcatcagagaaatgcaaatcaaaactacaataagataccatctcatcccagttaaaatggcttttatccaaaacacaggcaataacaaatgctggtgaagatgtagagaaaaggcaactctcatacaccattggtgggaatgtaagttagtaaaaccactacggaaaacagtttggaggttcctcagaaaaactaaaaatagatctaccatatgatccagcaatcccactgctggttatatacccaaaagaaagcaaattagtatgtcaaagaggtatctgcattcccatgtttactacagcattattcacaataaccatggtttggaagcaacctaagatccacagacaaatggataaagaaaatgttaggttgggcgtggtagctcacgcccgtaatctcagcactttgtaagcccgactcaagtggatcatttgaggtcaggagtttgagaccagcctgaccaacaaggtgaaaccccatctctactaaaaaatacaaaaaaattagctgggcgtggtggcgcatgcctgtagtcgcagctagctgggaggccgaggcaggagaatgacttgaatccaggaggcagaggttgcagtgagccgagattgcaccactgcactccagcctgggcaacagagtgagactctatctcaaaaaacaaaaaaaaaatgtggtacatatacacatggaatactattcagccataaaaaaggaatgagatcctgtcatttgcaacaacatgggtggaactggagatcgttatgttaagtgaaatacatcaggcacagaaagacaaacttcacacattctcacttatttgtgggggctaaaaattaaaacaactgaactcaagataatacagcaatggttaccagaggctagggagtgtagtgggtggctggggggatggttaatgggtacaaaaatatagttagatagaatgaataagatctagtattcgttagtacaacagtgactacagtctacaataatttattgtacttctgaaaataactaaaagagtacaattggattgttttaacacaaaggataaatgcttgagatgatggatactccatttaccctgatgtgattattatgcattgtaagcgtgtatcaaaatatctcatatatcctataaatatatatacctacaatgtacccacaaaaattaaaaattaaaaaaattaaaaatatgaggaaaccaacaaatccaacagaaattaaaaaggctgttaaagttctaactctgagttactatactagttttatgaatgctttttattagacataaagtttaatacagcataggagcaaataacatatagttaaaataattttatagcatagaaaaggacaaaaacatctgaatttaatctgtaaaacaagcacagaattagaactaaagtgggttaaggatagtgtaatgaaatagatcgatttcacttatgactatgtagtcaaggatcctaagtaaaatattagcaaactgaatacagcagtgtttttttaaaaaaagtataggcccaaactaaataggatgcattccagtatttccagaatggtcaacattagaaaaataatataatttactttatgataacaaagtaatggaacaaaatagtaaatcattttgacaaatgtcaaaacatcatttgatataattctacacagcttcagtttaaaaagaaaagaaattctcgtagtaagaaaagaggcagtttggtattagggtgaagggcataggctctgaagttcaagtttttggctttgccaattaccaatgtgaaactagcaacattattcaatgcctgctgccttggtttcctcatctgtaaatctggaatgaaattgacttaccttacctcttagacttcttgttaagattaagtgagtcaatgcatgtgacttagaatagttagaataatgtctggcacacagttaacacttagtaaatgttagccattattggtattgttgttactaaacaggtttagtaacctttagttactaaatttctttagtaagaaatacagatgtacaataaaaatatgaaaagatattcggcctcacctgctattcaaggaaatggtatattaaaccaaatggtatattaaaaccaaaagtacagctttttgggtgaactttctcaaaaagcctttgttacatattttgcagatacagttgacgcttgaacagcacaggcttgttgtactgtacaggtccacttaatattcgaatttttttcaaccagagaaagattgaatatattactatactatactatagaatctattactataaatagaaggatgtaccttttaacttttttatttatttatttatttatttttgagacagtctcacttgtcacctaggctggagtgtggtggcgcaatcttggctcactgcaacctccacctcctgggttcaagcgattctagtggcttggcctcctgagtagctgggattacaggcatatgccatcatgcccaggtaatttttttgtatttttagtagacatggggtttctccat[136 bp omitted]ggccaagacaggcagatcacgaggtcaggagatcaagaccatcctggctaacatggtgaaaccccgtctctactaaaaaatacaaaaaaattagccaggcgtggtggcaggcacctgtagtcccagctactcgggaggctgaggctggagaatagcatgaacccaggaggcggagcttgcagtaagccgagatagagctactgtaccctagcctgggtgacagagcaagactctgtctcaaaaaaaagaaacacaaaaacaaaaaagtacctattgaaacatacagcaaacctcaaatttaatgagaaaaaaactaaaggaattcctaaataaagttgaaaaattataaaaatcctaccactgttactaagaaactgttgaggtacctgcctagacaatgcaatacaaaaagtaagcagaaaatgaataaacaaattatgattatctgctgatgatataaatacttagaaaatcaaaataactaattgaaaaactgttaataaaacaaattcaccaggccaggtgtggtggctcacgcttgtaatcccagcactttgggaggccgagg[131 bp omitted]gacaaagaagaatcacttgaacccaggagggggaggttgcagtgagccgagatcgccccatcgcactccaggctgggcaacaagagtgaaattccgtatcaaaaaaaaaaaaaaaaaaaaaaaaattgccacattggttgaatacagaataaacataaaaatcaatatttttgtcttttatgtcagtaacaattagaaaatactatcagagaaaaagagattccactcacaacagctacctaagatataatacattgagaaatgaatttaacaagacatatatagaacttatatggaaaaaactgagagttctaaaaaaggatatgaatataacagatgacctgaataaatggagagaagtaccacattcctagacatgaatgtttgatgctgaaaagatctcaattgcccaaattagtctctctttttttaagagagagagagagactgttgcccagattggagtgcagtggcacgatcacggctcactgcacctcaaattcctgacctcaagtaatcctcccacctcagcctcccaagtagctggggttacaggtacataccaccatgactggcttatcaaaaaaatttatttttgtagagattaaggtcttgccatatgatgttgaactcctgggctcaagaagccatcctccctcatcagcatcccaaaatgctgggattaacaggcaggagccatggtgcccagcacccctaaactagtctttaaatgtaaagcaattccagtcaaaatactttggaggaggattaaaagtgcaagaaccaccaataacattttgaaaaccaagaacagaataaacatatcctatcatagtattacaaactataaaactacagtagttaaaaaaagtgttagtctggtagaggacatgacaaatactgggttaaacaataccaaattgcgtttttgtatgtccaaaacttgagtactggcaatttcagttgtttcgacctctatgagttcaaaaacagaaccatgtttgggaatctggtctataataaaggatggatttcatattgcatcatatttcaaaaaacatgtttcattcatttggggaaaaacatcattccatttacctcacacagcatcatataaaattaactttatatgaattaatgacctatatgtaaaaaagttagaaaacaaaaagtaccagaagaaattaagggttatttttattaacctgggagttaaaaagccttccaaataaaaataagacccatgaatattattgccatgaatattattattaattataatattattaatattcatgtcatgaatgttaattatattattaatattcatggatgaatattattaatacagttgtctaagataaaattttaaaactctgtgattagcaggaaaaaaaggtggcaatggggaagagacagttgtcccttggtatatgtgggggttggttccaggacccctgcgtatactaaaatcctcgactgaagtcccaccgtaagacctgcagaacccacctatacgaaagttggccctcctatatgcaggtttggcatcacccgaatactgtattttcaatctttctctggttgaaaaaaattcgaatattaagtggacctgtacagtacaacaagcctgtgctgttcaagggtcaactgtatctgcaaaatatgtaacaaaggctttttgagaaagtccacccaaaaagctgtacttttggttttaatataccatttggtttaatataccatttccttgaatagcaggtgaggccgaatatcttttcatatttttattgtacatctgtatttcttatgttaatggcctattcataacctttattcattctactaaattgtcttccttatattaagagaattctatatattttgctattatctcctcaccaacccatctttattggattattcacatcactatcaaacattaatacagccaattttaataaacaacacacacaaagagaacccagaaacaaaccctcgtctatatggtcaaatgatttcaacaatggtgctaaaaccattcaatgaggaaagaaaagtcttttcaacaaatagtgctgggaaaactggatatccatgggcaagcaagtcagacccttccctgacaccataaacaaaatttaattcttaatggatgaaagactaaaagtaagactaaaagcaagaactaaaactcttggaagaaaacaggagaaagcttcatgacactggattaggcaatgttttcttggctatgacaccaaaagcacagggaacaaaaggaaaaacacataaaatgggcttcttcaaattaaaaacttcaaatgttaaatgacacaatccacagagggaaaaggcaacccacacactgggagaaaacatctgcaaatcatatatgtgataaaagataaatatttaaaatatatacagaactcctaaaagtcaactacaaataaacaacccaacccaattttaaaatggatttaattcacagatgaaagacattggagaggacacaaaaaaggacacccctgccaacaagaaactattgaccccgcacctcctccagcttctacccacttcattgtgaaacttcttttaaagaagttgtgcatttgtgctctggtccctgacctcattcactcttctgctacactactccatgggaatagttcttaaaaaggccacttggcctcttgccttgacacttctcagtgatacttaacacacttaacacaggggtaaccactctacttcttgagatgcattatttttgatttttgagatattatcccttctagtttttctcctaccttaatgattgctctttcaatttcctttgctggcctctcctatttatcagatctttaaatgtttaagtgccacagagtcaaaaattttgcttctccattgaaactccctccaaacttgaccctattcagtcttctggatttaaataatataaaatactattgactcccaactgtttatatccagcattgacctctctctgagtttcaaagttgtgtaccattcacgtgtctatgacattttactaggatatctagcaggtgtctcaaattaaacatgtttaaaaaagaatacccaactttctgcccttacctcctcccaagccccataacctgcttcttatctgatttgcttctcaataaatgataccactgcctattaagttgcttaggccaaaacttaatcataattcttagtttctttctaaatagaactttcctaaaattctatttaggctttttcaactatggttctgagaaagaactcagccctgctgatctaagactggattaacttccctcctatgcatctagaatagaatagcacatccttaagagaactaagaaagatgggaacctcagtcaagaaaggctgctagactgtgaacaagcccctctatccattattgtaactccagaaaatgccatcatatttcacacaagataatgtaataggctgttactggtctcacaattcctgtcctcaacccttttcagacccttctccacacaacaagcaaagtcatctttgtaaagtgtaaatcagattataaacaccccttatttttattctctagaggcttcctccttacatcataataaaactcgaactcctttttgaggttttgcaagactctccctgatctaaattctgcctacctctctctgacttcgtctcctgctagtctcctctctctgctttctttgccatactggtcttccttcaatccttcaaatacgcaaaataaatcctgtgtcagtgactttgcagtttctgttctgtttacccagaacactgcttgccctagatctataaatagctgccaccttcctaaacttcaggtctcaggtcaagtgctgcctcctcacagagactttctctgactaccccaatagaacatgtctcatctgctcctcccatcccactcctcggttgtttccttcacagcaccttttacccactgaaatgatctttacttacttgtctacactttttaatgtctgattcccactactagaatacaagatctatgatgttaagaattttgtcttgtttattgccaaatacagagtaagcaatcaagaaatgttagttctattatatagtaaaaatatacggaatcaattttggatgaagaaaaaagtcacatgtaatttgtagtcttaactcactggaagagtggtatttaaatattattcttttgaaaaaaccagtcatctagtttcccaaataacgtgtggagaaatgacactgggaacatattacttacagtttcgtatgtaacaattggcaactgatgactttgccaggagttccattcccaaatcctgcaatctgccagagttttcagttccacatgcagccagagctgcctggtcagcagaaaaaaggcttgtctgcatgtctccagaagcagcactgctgctttttatttctgaaagtgtattctttacatcagttttcatacatcgaacttcggccatttgagttttgagtctttttagcatctttaaatcagagggcactcgccacattgcctgttgcttcctttggtctttatcttttcgagaatatgatgcttcagagaaattgacaagtcatgttaacataaacgttaatattaatgaaatcatttgtaccatgaatatatgcaaatttgatgtgtaaaataagctagcgtgctttacgtggtatcaacaataaaacatgcactaaattccattaatgaaaataaagataaagaatcctaccttattcacaccttcagagttagaatctgagtcacatcatactcaagttcgaattacacatttaattctaaaagtttaaaagctgccctactgccttgtgctttcttctttaaacttctccacttttctgaaactttctacagagcttttattatgtttataattgaaaaaaaagacaaagaaaaatctagaaaccaaatactttgtcaaatctgccatatataacattatattaaaaatacatatttctggccaggtgcagtggcttatgcctgtaatcccagcacttcaggaggctgaggtgagagaatcgcttgaggccagaagttcaagatcagccaggggagcatagtgacaccctatctgtacaaaaaaaaatttttttattagaacttccatttctgataattttctcagaactgtcagctttctgaaatacggtttgaatctaaccacttctaaaataaaacaatagctctccatgcctagtatgaataaattcctccggctagcatgcaagtcctttcatagaatggacccaacatgactctagttctacttaccactatatgtaccttaaaatctggttcaactagattacctgataccttttacagtactcctttacatggttaagaacatgaagttaatctgacaaatgttcactaaatatgtgttaaataaatacacagaaaaaaataaacatcaaagcccaagcaggccacgtgcagtggctcacgcctataatcccagcacactttgggaggccgaggcaggtggatcacttgagctcaggagttttgagacaaacctggccaacatggtgaaacctgtctctacaaaaaattgtagagcactccagcctgggcaacagagtgagactctgtctcaaaaacaaacaaacaatcaatcaaacaaaaaatgacccaagcaagccttttcaataaaaagaaagtcatatatttctgcacactagcttttattaacatcccttcactgaaaggtattttcatttggcttccatgagtattttttctcctttctaaaagctctttatctggctcatcttcctgacactcagtaaaaacagatattcatcaggattatgttcctggctctcttcttttaaaatattcttaaaactcctttgcaatctcacacccttggttttaattatccagtatcacctccagaaaaataactgtctgtattccagttcatttttttttttcatggagtttcactcgttgcccaggctggagtgcaatggcacgatctcggctcactgcaacctccgactcccaggtttaagccattctcctgcctcagcttcccaggtagctgggattacaggcacctgccacaatggccggctaattttttgtatttttagtagagacagggtttcaccatgttggctaggctggtctcgaactcctgacctcaggtgatccacccgcctcagcctccccaagtgttgagattacaggcgtgagccactgcgcccagccccagttcttaatttttagctgtctactggtcctttctaatttgatgtcacactgttatgcccaactcaagatgtttaaatccaaaacttgctttttctttctactattttccccgccctcattattgccagcattttatcacctaaatttgaaattcagatcatctcatttgtattgtttttacacagaaaactagttttacacagaaatcttactatttagtttgcatttttcccaatgatactgattattttcaaaaacacgattttacttgtctataaaatataccattgcatggttacactgtaatttattcagctataactgtattgttgaatatttttaaacatctgcttgttttctctttggaatatactcctcaaagtgaaattacaagtttaaaggatatagatatttttaaactactacaaaattgtccttcaaaaaggttaaaccaacttacatatctacctacagaatcagaacctgtctgtttcactgggcctttgcaaacaacacttaacatttaagtaaaactttatataaagcatacttggcgcacacataaaaggcaactgtttcataacctgaagatagtcttttaagctgaggatccagactttcaggaagtatatctggctcttaggaaagaagaagcctaaataatctgggctccatgtccctacaccagtagaagagctctatttctctgttatttacacagaggttctgccttggactttgattgaaaaatgagttatcttgccttaaaactacatcaaaatcagagttctaaatcattgatttgatgtatataatactattgtttaagaaggtagaaaaatatttggcatatatttttgaatatactgactatactttagaaagcattccaacaaaaatggtttttaaaatgtagcttttaaaggcaaatacttagttgtccaaaatgactctatccccgagagtttaaaaaagcccatatttgactatacaaatctccattttattatagtaacacaaatgtaatttctatttaacaaataacctttgcacagaaaacagtgctgccaactggcatacatttttaagctactgaacatcaaagaatgagtaagtcacctttttctacgttcaatttagatatagttccacttggaagtaagggaattcatgaagcctgaccaaaaaaagtccattcataaagaagataaccgtatttcatatggatcaaactgtcaggcaaaatctgagtagcaagtcacaaaaaaccttcttgcaggcatttttactttgtttttgcacaaatcacctttgaacggtaatttaaaaactaatttggttgacataaatgtcatttttatggtatacaatgaaaaacacagaaatacaccatgttccacacatagctgaaatacttaaatgaaaatccaagagttcttttagagaaccacagaaaaaaaggaaattatcattgttattattttacctgtgggctgcagaagtgaagcaggtgggcgaggctgtaagccccacaaattttctatactgctccggtccttaaggtccaacaaatgtattaaaattaatggatcaatgtctagtaaactactggtagcagcggagcataaatgtgttcttcttgatattctactactggaacccacataaccatggctactacctgcaaaagaggcgtagaaaatgatatatatatgcacaaacttagctatacttaaatgaaaaaatgaactggttaacattatatgaatacttgtctatggacctatctctt[224 bp omitted]gaggcaggagaatggcgtgaacccgggaagcggagcttgcagtgagccgagattgcgccactgcagtccgcagtccggcctgggcgacagagcgagactccgtctcaaaaaaaaaaaaaaaaaaaaaagaaagaaggaaccagacagttgtacattagcacagtgattgagtggtggcctcattagtacttagaattcagaagcaagcctcaaccccatcctgagccctagaaaaaaacagatgacaatgtgtacgatgtgcacaattggggggatgagaggtaagggtaaggagaaggagattatatcccatgaccacctggttttagataaaagaagacaaattcccatagtataacagattacaaagaattagacaccaaaatagaaatctcccccaagtctctggacagtaaaatgtataggtcatgacagtttggtagactttttctactttgattaaataatggggtacaatttgaagtttttggactgtcatgttaatgactgatgcacattacagacatctgtaggcagatattatgcctatacccctatattggactatgctctttaagccaagaaaagcatctgacttttctctagcacctagtataatgcataacaaataccagatatggaaatgttgcttaaaactgaccttcttcaataaagctgtttaaatatattttaaagagatagaacattttaaaacaatgctacacgcaggaaagtagataatataaaatattaaaaagtcaggttccaactacccatgagtatttcagagagatccagcaggatataacttaggaggaaagttccattgttcagaagcttcaagccaattaataatttatgcttttcacatcctcatgttctcactgtctcccacttctgcctcctcttctaaggattattatctcactgacagtttttcttcccagcctctgtattactgcaattcctattaaataacagaaaacgatttccccttcacattgaaaactgttctttgttgtgttttgagacacagtctcactgttgcccaggctggagtgcagcggcccgatctccactcacggcaacctccgcctcctgggttcaagcgattctcctgcctcagcctcccgtagtggggactacaggcatgcaccaccacacctgtattttcagtagatacggggtttcaccgtgttaggatggtctggatctcctaacctagtgatccgcccgcctcagcctcccaaagtgctgggattacaggtgtgagccaccgcacccagctgaaaactgtttttacctcttttcttttactaaggaattcccaaattgggttgtatgtcagtcagctgaaggagtttttaaaattacatcctagatacactgaacaagaatactggggtgagaagctgggtgcagtggctcacgcctgttatcccagcactttgggaggccaaggtgtgcagatcacctgaggtcaagagttagagaccagccttgccaacatggtgaaaccaaaatacaaaagaatagccaggtgtggtggcaggcacctgtaatcccagctactcgggaggctgaggcaggagaattgcttgaacctgggaggcagaggttacagtgagccaagatcacaccactgcactctagtctggttgacagagtgagactccatctcaaaaaaaaaaaaaggatacggaggtgagatccaggactttttcccaaaaagctactcagatcgttcttatgtatagttaagtccagtagcccagtgaatggaatctattgccctaatatctgattctcctttaaaaatgtaagttgctcattcttccatgttaaaggcacttacagtagagaaagcggtgtctcctgtttctcactgctttttcaggccattattctcactactgaacaaaaactgcttttttttttaatgtgggtatgacctttggctactcccctttcaaatgttcccagctttcttttcttttttgtttttttgagacggagtcttgcctcccaggttcaagcaattctcctgcctcagcctccctagtagctgggattacaggcatgcagcaccatgcctggctaattttgtatttttagtagagacggggtttctccatgttggttaggctggccttagaactcccgacctcaggtgattggcccgcctcagcctccgaaagtgctgggattacaggcaggagccatggtgcccggcctatgttcccacctttctacccactatcacatttccccacaggcatcaaagactttgggttggcactgatttcagtttctctctttccaagctattctgtgtgtctcatatataaatgtacatcccaatgaatgctcacaaagtgatcacacccagatgaagaaatatattatcagtaccccagaaccccctcctatgcctcctaaaattgctcactactcctactctacaaaaataaccttcatcctaacttaaattacagatgggttttgcctgttttgtatttgtataaaagtagtaacagagtatgctcttatgctcttcttctttggtcaacattattcatgagattcatctatatggctgtatatagaagtatcttattcattttctttttaaatatttttctttttttctttgagacaaagtcttgctttgtcacccaggctggagtacagtggcacaatcttggctcaccgcaacttccacctcccagtttcaaatgattcttgtgcctcagcctcccgagtagctggggttacaagcgtgcgccattgcaccaagctaattttttctactttcagtagaaatgaggtttcgccatgttggccaggctggtcttgaactcctggcctcaagtgatccacatgcctcagcctcccaaagtgctgggattagagacatgagccactgcctcattttcattattattgtgcagcatccatttatgaatatatccaatttatttctttattctattggaaaacaatttgggttgcttctagcttttggctattaagaataaagctatacagccaggcgcggtggttcacgcctgtaatcccagcactttcagaggccgaggcaggtggattacgaggtcaggagttcaagaccagcctggccacaatggtgaaaccgtctctactaaaaatacaaaaattagctggccgtggtggagggcacctgtaatcccagctactcgggaggctgaggcagaattgcttgaacccaggaggcagaggttgcagtgagctgagatcgtgccactgcattccagcttgggcaacagagcgagattcaaaaaaacaaaaaaacaaaaaaccaaaaaaacaaaaaaacaacaaaaaccatgcttctgaagttcacatagaaaaaaaacctcataaaaagacagacggatcggtgacaggttcttctccatttgtgccaagccatatggatcttgctaaaatgtcacacttatatacttgagttcattacagcatactgcctgtatgcattatcatgacactcaaggccctattatagtctagtctcaaactacctttccagaatattctacattttcacatccttcactttgttacaaattacataccgatatttaccatcacaaaatcttgtaatgatcagtgctggattttcatttaaaaattatgctcattcattcttctaacatctgtggtccaggtgcaatagctcacgcctataatcccaacactttgggaggctgaggcaggaggactaattgaggccaggagttggagaccagccagggcaagagagcaagactccgtctctataaaaaattagttgggcgtggtagcatctgcagacgtcttcttatgagaactgcttttagtttattcagttatttgaagttaaatgaaagacaatttatgttaaaaaaaatttgtgctaaaaaggttttaagtatcattctaatccagattattggctcattgaatccagtgagtaggaaaaatctagtttgtatttgctgggggtgtgtgtgtgtgtgtgtgtgtgtgtgtgtgtgtgtgcacgcgtgtgttttaagagacagggtcttgctctgtcacccaggctggagtacggtggcagaatcatggctcactgtaccctcgaactcctaggctcaagtgatcctacggccacagtctcccaagtagccaggactacagccagttgagtcaataaatatttcttgtttcaagctatctccttatttaatatggtctataaaataagattattaagtaaacatttaactttatacctagcttttatataagcccaatcatcccctttttaacgcataacttaacatcgtaattctttagatcacataactctttagacaattgtgtagttctaaaacattaaccaggccaggtgtggtagctcacatctgtaatcccagcactttgggaggctgaggcgggtggatcacttgaggtcaggagtttgagagcagcctggccagcatggtgaaaccccatctctactaaaaatacaaaaaagttagcttggaatggtggtgcatgcctgtagtcccaactacctgggaggctgaggtaagagaatggcttgaacccgggaggcagaggttgcagtgagccgagatcgtgccattgcactccagcctgggcaatacagcaaggctccatctcaaaaaacaaaacaaaacaaaacaaaaacaaaaaacacataaaccattcgaggcttgaaatggaccttcataataagcatattaaaaaaaagcatttccacactctgcccagtgtcaccccgatctagctttttcattgccttggtttaaaaagctttttattggccaggtgcagtggatcacacctgtaatcccagtactttgggaggccaaggagggcagatcacaagatcaggagatcgagaccatcctggctaacacggtgaaaccccatctctactaaaaatacaaaaaatcagccgggcgtggtggcgggcgcctgtagtcccagctattcgggaggctgaagcaggagaatggggtgaacctgggaggcggagct[137 bp omitted]ggaaaggtaaaaatacagagagttcctgtacaacccagatccaatttccccaatgttaatacctttcattactatggtatatttgtcacaactaatgaaccaatactgatatattattaactaaatcctatactttattgagattttagtagttttcccctaatgttctttttctgttccagagtctcacctagagtactgaaatacatttagttgctcctgtctttttagactcttctggtctatgacagtctctcagactttccttatgtctgaaagtatgtcaaatattttgtagaatgttcctcaattaagggtatgattttttccctcatgattagattgtgtttgtgggtttttagggggaagatactacagatataaagtaccattgtcaacatatcaacatgacttatcacttacaatactgtcaacatgctatcaacatgacctatcacttacaatactaaatttaatcacctgggtaggtaatgtttgccaagtttctctacttcaaagttgtttcccccttttgaaactgtactattcagaagcaagtaactaagcacagcctacatttaaggggtagaagttatatttcatctccttgagaagggagtatttaaatgatttggaattcttttgtatgtacattgtcatattctagctaattgttcataaatatactcacccttaggttataaattacttagtgttgtatgttccaggtaggcatgatatttaacaaatttctgccaaatacataaatttcccaaagcatataataaaaataaactggttcattattatgtcttcaacatctagaatacagtgcctggattattacagaatattcagaattataacataggctccataagaacagggatatcttgttattcaatattgtatctctagatagtaaaactgtacacagctcaagtgctcagtaaatatttgatgaatatataattcaaaaatgtaaactcttctttaccctaagtgtatataaatgttatatacaagaatctctctaccacacagtttaagagaggaaagaatggacctaactaaaagaaaacacacaaggctgaaaagttagtcagtcagtaagacctaatgccataccagacaaggattaagtcacacgctccctatacttaaagaataaactacattctaactgcaacagaatttcttcttttttctagaagctaagcaagcactggcctcaagataagcaatattgaaacaattgcagcttactgactgccagatgctgactgactcactccctgttccacagccgtaactacagctttgactggacaagagactgatttcagtaactttctcctgataggagtcgccaaccatggactggttctggcccgtatacagaggctgagcattgagtgccttcgtgtccttggctttaccttttgacaacagggcctaattgtaatgcatttaaattgttcagtccccactccaaagtaaacatgaaatgcatgtaacatgcatgtttgtctactatgcatgcgtgtgtttcccttttcatgatgttcacagctcctcctatagcctgctgaatcgatttagttgtacttggccaacttattcagcatcaattcctatgttacccttccctcctgcaaagtgcctgcttttagtctttgccagaggccacacttcccagcctgtcaggatggccagtcttttttttttttttgagatggagtctcgctctgtcacccaggttggagtgcggtggcgcaatctcagctcactgcaagctccgcctcccaggttcacgacattctcctgcctcagcctcccgagtagctgggactacaggcgcctgccatcacacctggctaatttttgtatttttagtagagagggggttccatcatgttagccaggatggtctcaatctgctgacatcgtgatccacccacctcggcctcccaacgtgctgggattacaggtgtgagccaccacacccggcccaggatggccagtctttataagaattaaagctcttctctccaaattggtagatcttgtgattctttgaagttcctcctgactaaagaatgatacagaggaatgacagaaataaggctaaggaaacaaacaggaatccagacacaaaggaatttatgtgccatgttaacaagtttggactttatcctataataaatataatccttaaagagtttttaagtagagaaataacatgattagatattatttttcattatttttatttctatttttgacacagggtctcactctgttgcccaggctggagtacagtggtgctatctcagcttactgcaggctccgcttcctgggctcaggtgatcctcccacctcagcttcccaaatagctgggaccacaggcagcaatttagccaccacatctggctaatttttttgtatttttttgtagagacaaggtttcaccacgttgcccaggctggtctcaaactcctggactcaagcgatgcacccacatcagcctcccaaagtgctgagattacaggcgtgagtcaccaagactggtagagaagtaacatgattagatattaatcagaaagaaaaaaacaccctcattctgaatccatgctgtaaaaatacaatggaggggaacaataataaatacaaggaacccaggtgaaagacagaggcctagactagaaatggcaaaggagtgggagtaccaaatgaatttatgcacgatttaggacacagaaccaacagatcttggtaatacactaaaggtaaagttttagggagaggaagaagtaaagaatgtatagcattatcagtcacggtggctactgctgacaggcaggctggcagatgaaaagacagtaatttgtgtttgggaagtgctgaatcacacaccaagacatgggtttggaaactatggaaagacaaaggctaaagaaagaacttgaaaagtaatcagcatatagacagtaactgaaatacaggtgtggataagattacccaggattaaagtcaggagtagaaagaatatagagcttaggttggagttgaaatggtgaggactagtat[224 bp omitted]gaggcaggagaatggcgtgaacccgggaagcggagcttgcagtgagccgagattgcgccactgcagtccgcagtccgacctgggcgacagagcgagactccgtctcaaaaaaaaaaaaagaatatgccagtgttcatactgaggagaacatgggtaaaacagaaacagtagaaagctaacttttaattactctaaccaagattcactacttaattaaatagatccgagaacacacaaaaaagtactcattatataagtcagttcttcccaggagaagcagtgttttagtttgggagaaaaatgctgggtccacaaacccaggacaatctggggttctagtctggttgtactaacaaccagctatatgaccaggtaactgaaaactataaaatgagctctttaagatccttcgtaagtctaagagtcaatgattccactgagatcattctatagtctagcaagatatacaaataagactttatatcagaaagaatagtataaaatatgagcatgggatacaaacaaatctggggattcaattactctcatttactaaattgttaaaagttggcaagttgctttaatttctctatgcatcagtgaatgtatcacacagaattttattaatataaggtacttaaagtgcttctcacagtgcctggtacataaaacatttttcaaatgttagctattgttttaaatatctttagtaataaactctaaaaaatccatattataagatataccacttccaacaccatgaaccatgtacaagcagtggctaccacctatttaaaatataatacagtcagagaagagcagagagaaaacagaatggcttggaggcagtggagtgacctcattacctgcgggtcctgcagcagctgcatcttccatgagttctccctcttctaattccatgttgttatattccacatcattttctccagacctaagaatatacaaaatccatcatttatatagagtgatacaataaacgttgtttttcacacctcaataaattttatgatatgcagatttttctgtgaaataagatatttctaaatacaaaaaggagaaagatttttgtcattttccaaatttaagtagcgttaatgttattgtttaaacaacctttaaaaaatatcggccggg[138 bp omitted]gtggcaggcacctgtagtcccagctactcaggaggctgaatcagg[134 bp omitted]aaaaaaggaatttaaaaaaaaaaaaaaaaaaatatatatatatatatatatatatatctcaaggccgggcgcagtgactcacgcctgaaatcccagaactttgggaggctaaggtgggaggatcacctgaggtcaggatttcgagaccagcctggccaacatggcaaaaccctgtctctcctaaaaatacaaaaattagctgggcgttgtggtggggacctgtaatcccagctcctcgggaggctgaggcagcagaatcggttgaacccgggaggtggaggttgtagtgagccaagattgcactactgcacttcagcctggacgacagagcgagactctgtctcaaggaggacaggacaggacaggaaaggaaaggaaaggaagattaaaaaaaaagaactgtgtcaggcaaaaaaatagaaataaatgaaacactaaaaaatctaagaaccactattagaagagattaatctctcctatttaattagtgttagaaacactaataaatacaagaaccactgttagaagaaattacagcttcagagaactggtagcttaatggcaataagcttaaaacactacatgtagtgttaggcttaaaacactacattttaacatccaaaaaaagcccaaattactgtatatgactaaataccatttttcaaaaataatatttcagcaaagagggtattacttcctactcggccatacaaagtctctcatgttaaaaaacaatcactattactttattttaaacaacatactacttgaaacagtaccagtcaatgacagtcttgggtatttaaggaaatctcaagataagcacccagcttgacaatgtaaggagctctgtaggtctgctctttagtcaaactggtgacaattattttaaaaacaaccacttaacgactctggaaatggtcccaagggcatacagcaaatgaagaaacatctactcaaaaaaatctataaaaactgggtaagacaagtgggcatctgcagtatttgaaccaagatcactccacttcctaacttggtgttacagaaattccactccagactggtgcagtgaagaacacaggcctcccacttcccgaacttccaagaggagggctatattcctgggagtggcaaggtatcagcatctctcattctgcccccagctacctattgctgatgctatagtacaggcacacacggccaagaggtggagactcccttctgctgagacccacttgtggactagatgctctacctggatgcagcatgatgagaatactggggcccagatcatccctgccccagcttattcataaggtggaggtcccaagcctgaaaaggaaagaactaaggctactgtccccaacatccagttagctcagcttctaaagtaagagaggtacacctttatccttactccaacttcaaagctttggctcagagattttgcctatggggagaagcagagacacatacaacactcagagaaacatacaacactattaagagcatcaacgaaatatagttggccttctttatctgtgggctctgcatctgtgcattcaaccaactgtggatcaaaaatattttttaagccctggtgtggtggttcatgcctgtaatcccagcactttgggaagccgaggctggagggacttcttgagcctaggagctccgggccagcctagaacatagtaaggcaacatagtgagaccctgtctctacaaaatattaaaaaattagccaggtgtgttggcatgcacctgtagtcctagctacttggaaaactgaggtgggaggatcacttgagcccaggaggtcgaggttgcagtgagctgtgatcacgcgaccactgcactccagcttgggtgacagggcaagaccccgtctcaaaaaataaagccggccgggtgctgtggctcacctgaggccaggagttcaaaaccagcctggtcaacattgcaaaaccctgtctctactaaaactacaaaaaattagtcgggcgtagtggcaggcgtgtataatcccagctactcaggaggctgaggcaggggaactgcttgaacccaggagacggaggctgcagtgagctgagattgtgccactgcactccagcctgggcgacaagagcgaaactccgtctcaaaaaaaaataaataaaacaaaacaaaataaagtcatgcgcagacattttccccttgtcattattctgtatacaatagagtataacaactacttacatagcatttgcattgtattaggtattataagtaatctagagatgatttaaaagtataggggaggatgtgcataggttatatgcaactactctgccattttatataagatacttgagcatcctcagattttagtatccaagggcggggtcctagaaccaataccgcaaggatactgagggacaactgtactagcaaacagaatgcagtaacatataaaaagaatcatgagccgagtgtgatgatgcacaccagtagtcctagctactatggaggctgaggcaggtggatcacttgaggccagagttgaaggttacagggagctataatcatgccaccatactccagcctggccacaa[133 bp omitted]aaccccatctctattaaaaatacaaaacaaaattagccgggcaaggtggtgggcacctgtagtcccagctacttgggagactgaggcaggagaatggtgtgaatccagaaggcggagcttgcagtgagcggatattgcgccactgcactccagcctgggggacagagcgagactccgtttcaaataaaaaaaaaagaaaaaaaaaattacggctgggcgaagtggatcacacctgtaattccagcactttgggaggccaagacgggtggatcacgaggtcaggtgtttgagaccagcctggccaacgcagtgaaacctcgtctctactaaaaatacaaaaaattagctgggtgtggtggtgggtgcctgtaatcccagctacttgggaggctgaggcaggagaatcgcctgaacccgggaggcggaggttgcagtgagccgagatcatgccactgcacttaagcccgggtgacagtgcgaaactccgtcacaaaaaaaaaaaaaagaaaaaagaaaaaaaattacacactatgaccaagtgggatgtgtcccaggaatgcaagcttggtttaaaaatccaaaaatcgccaggcacagtggctcacacctgtaatcctagcactttgggaggctgaagtgggcagatcacctgaagtcaggagttcaagaccagcctggccaacatggtgaaaccccgtctccactaaaaatacaaaaaaatagccaggcgtggtggtgcacgcctgtaatccttgctactcgggaggctgaggtggaaggatcacttgaacccaggagatggaggttgcagtgagccaagatcgtgacactgcatgccagcctgggtgacagagcaagactccatctcaaaaaaaaaaaattatccacattaatgaaattcattagttcatcaattaacagggcagaaggaaaagctcttccttaaattgcaactaatgaatgagtaagaaataatggaattagaaaaacaccacttggcaatcaacacagtaacctttttcaggcaacactcatcaaagggtgtcaaaattcataggaaaaagtaggatgaaaaataggatatttacagtcccatacataagatacttattaattataaaggaaaaagtacaaattttggagtgaagaaacctggcggatgctacctcaactaagtgatcaaaattaaccacaagtaatgggacatactgacatcatgctccactctgtatgacgcagtgaaaaggatacattatcatttccgtagtatccctgccaaaagtgtgtaacctctatctaatcatgaggaaacttcagactaatccaaactgagggactttctacaaaataaactattctgtatttctcagaaagtattagtcatgaaaaacagtttttttttttttttgagacagagtctcaactgtcgcccaggctggagtgccgtggcgtgatcttagctcactgcaagctccgcctcccgggttcaccccattctcctgcctcagcc[134 bp omitted]agcctcccagagtgctgggattacaggcgtg[232 bp omitted]gaggc[137 bp omitted]taaatcgatttaacaattaaatgcaacatgatcctgacaaaggacattactggcaaatttttagaaggttacagtattacatcaatgttaatttccagattttgataactattctatagttatgtaagaatatccttgtttttagaaaagtacacaatgagaagtatattcgatctcaagtgtttcagaaaaaattatatacagagaaatataaagcaaaatattcatagggaatgaatctgtgtgaaggaaacatgaaattctgaacttttcttaagtataaaataatttcaaaattcaaatttaaaagttaaaacacaaacaaaaattattggctaagagcccagagattagagagagaaaactgactattgattcaatctttcaaaaaagtgctgaatatccctacatttaagtgtgagttagttaatatgcttctaataattaccacttaaatgctttacagtagtaaagtgggaaactcacatagtttcttcatcaatatcattttcttctgtattacttgttgctgtggaactagcagaggaactgctgccatcgagctgatttacttcatcctcataaacaagatccagatccagatctccatctgaaagctcgtgctagatcaatgccaagaaaacaagacgtctattccaaatgtttctactcagttgatcaccccatccagcccataaaccaagcaccaaagaataatacagttttcaaaaatctattttctgctcctgtgcctcagctgctgagccctgtagagaaaaatcacacaaccacactgactgatatcattttactaacttatgcgtgccgccttcagctgggccctcagtgtgactggaatccttcacatattccacatcagcttcctcacagagtaacgtttcaaaccatcactcctcaattctacctaattttaccattatcaaggtcattaattaacactgtcacctatctgcacagaaaaaaaatacccactattaagcaaaaacttccccaacttttcagctgccttacctgcaaactccacccttcctttaactcagtttatcaaaggttaactgcttcacctgactgctccattccaaaccctattatctctagtttatcaaagcacttaatctgtgcattctctcgacccactgggtccttcattttaacttaaaactgaagtctctcatcttaaaaattactacaaaaaaaccaactgtctatgcatcccttcttatgtaaaaatatcaactacttcttgaactcttattctggattctgactgttgtttagctgggatagaacctggctagctaccgaatcctaaatcagtctacctacgtaagtaatgataaggcatgtactagtttcagtgaatgaaaatagaacaccttttttttttctttttctttgagacagagtcttgctctgtctcccaggctggagtgcagtggcacaatcttggctcactgcaacctccgcctcctaggttcaagtgattctcctacctcagcctcccaagtagctgggattacaggcaagcaccaccacacccagctaatttttgtatttttcgtagagacagggtttggccatgttggccaggatagtctcgaactcctgacctcatgtgatccacccaccttggcctcccaaagtgctgggattacaggtgtgagccaccgcacccggccagaacacatttttaaaatccacaatgtatggtagtttaggttttaaaatgtgtatcacggtttgttttatacaatgtattgtttttttcacaaccttgaaatgctttgattcaacaacttctgacttattaacatttacataagggcatacatacattactaatggaaatcaatggacaatatttttagcctactgttttagcacataatatgttaaaagccatgatgctactgtttttttttaatcaaacacaaaaatctaaaactggcctcattattacatgataatcttcattctgaatcttctcctcatcttcttcatcctctttggcctctcttacagaagctgtagtaggaccaccttcgagaagcatgtcagagcatgcagacttcttagctcgtgtctccagagcatcatcattttgggggctaagatggttatctggtggtgacaaatctcttgacttctgagttcgagacagctcaatagtaagtctcttttaaaacaagaaaagcacaaatattagccacagctcactggcacagtaaaagatgtctcaagtgaaaaaaaaatgcatccagatgtttctaaaaccattgctttatttattttttgagaatggtctcactctgttgcccaggctgaagtgcagtggtgccatcatagctcactgcaagccttgaactactgggctcaaacgatcctactgcctcagcctctcaagtggctgggactggaggtgtgtgccaccatgcttggctaatttcatttttatttatttttagagacggtatcttgctatgttgctcaagctggttttgaacccctgggctcaaatgttcctctggcctcggcctcccaacatgctgggattacaggaatgagccacctcacttggcaccatttcttaaaccatttctctgaatccctactgccttttatttataaaaaaaaattgatgacaaagataaactgccccatttatgctcatcctccttctttcatatccagcctaagctaaacatacaattagcaaacagtatagtgaatacaggcagttttaaatagcacatttaacatgaaaatctctgaaagcatgtatttattcacattttcctccctgacctattaacgactctcagcactccaaacctcctgccacaccctaacttcctaagggaaatgaaacattccttagtttaccactgtaaaataaaaattcatcaattaatcttccccagtgctcattcaacaatagtaagagttcaagatgggacaacttttaattgtgctatagcctagaatcctctaaatccaagataacttgtggaagagaaactaagtcactgacagaaacacaaacagcttacctcaaactacagccacactgttcaaaacaactttatgcaatgatggaaatgctctagatttgcagtaaccaatgcaagcacttgaaatgtggctactgcaactaaggaactaaatttttaattttaattaagctaaatttacagaccaggcacagtggctcacacctgtaatcccagcactttgggaggccaaggcaggcagactgcttgagcccaggagttcaagaccagcttgggcaacatggagaaacccatctccacaaaaacaaaaactagccatgacacatgctcgtagtcccagctacctgggaggctaaggtgggaagatcacccgagcttgggaagttgaagctgcagttagtggaaattgtgcctggcaacaagagtgagtccgacctgt[132 bp omitted]aaaccctgtctctactaaaaatacaaaaaaattagcccggtgtggtggcaggcgcctgtagtcccagctactcaggaggctgaggcaggagaatggcgtgaacccaggaggcggagcttgcagtgagccgagattgcaccactgcactccagcctgggcaacagagcgagactccttctcaaaaaaaataaataaataaagtaaaataaaaatttacatggccgtatgtggctagtgtctactaaactggacactgcagaactggtaaggatggggaacaagataactagattttttttctaattacaaattacaaaattacaaatagcaataaaatatataaaatctaattacaaatataacaagccaaaaggacaataggaaacaccaaaacagaaatagatattttcttacctctttaaggttgtttatttgttggatataactagtctgtgcagcttccaactgagtaatgtaccaatgctggtcccgggatttttgaaagaaagttggtgaacgtacctgaaaccttaaaagaattgtgccacattaaaaaaaaaattcaaatagtaaaacattatcagtctagcactgaattctgcaatttgggttaacttgattataaggccaaaattcacataaacttagagctgctagtatttgttgtttatagatgtagtccacagattatgacacaaggttctgaaaagccagttgtcctcaaactacctttctaaagaaataacattgtacattgtagttaagcttcccaaactaacctactcaggcatatttattataataatgtaactaaaatacaatgatgatcatgagttgggaagaagagagccatatactatgcagtttcctcctataaggaggaagataactcttatccctttctt[138 bp omitted]gcctcagcctcccaagtagctgggactacaggcgcccgccactacgcccggctaattttttgtagcaaaatacaaagttttaagtgctgctctttatatttctctattccatctcacgttcccgtatttcctgcccctcagaaaaaaaatcacttcctggctcaaccacccaggattgctttactatcccccaaggagttacatgctctaaataaactatatcctgaacccttcaagatagcaatcaaaactgcccttattacaatatggcattatttcagcttaggttaggaaaaaaagtactgcacctacataaaatcgtattaatatataaatgacagaatcttaatctatccagagttgttttaattaaaaaaaaaaaaaaaactattactaaagcaaacaaacctctacctttgttacatagcctaacgtgactatatttaaggtgaaaaaattgcagtgcatgtgtgaaggtgtttttgaagaaaggaaaaaccacaaggcaagactaatttggacatctacatctctctcattccttccagcccttttacccggctacacaatgttagctgttcatttttttctaggattttacaccttattgtaagaacctactgaccatttaacagttatctggcagtagatatctagttttagtgaagaatactaatgcaagaaaggacagaacataaacactgactataaaacaacagtcctatttaatgttgggatagtctttataggtcagaagtttttgggcatcattatatgttataactggatgatcaaaatgagaacttgagtattaaaaaaagagagagattggccgggcacagtggctcacacctgtaatcttagcactttgggaggccgaggtgggcagatcacctaaggtcaggagttcgagaccagcgtggccaacatggtgaaaccccgtctctactaaaagtacaaaaattagccgggtatggtggcgggcgcctgtaatcccagctactcaggaggctgaggcaggagaatcgcttgaatctgggaggcaaaggtggcagtgagccgagatcgcaccactgcactccagcctgggcaacagagcgaaactctgtctcaaaaaatcaaatcaaatcaaatcaaatcaaatcaaatcaaatcaaatcaagagattaaattacgttctgaacggaactgagtagagatgattcactcaactgagcagagacgattcacagtctaggaagtacccactggtaagacattaaagtaagaccgtctaaacactattattttctttgaatgatttaaaccactggttaactctgcacattagttctaatattttgccattaaaacaaaaccaagcagcaggtaaaatttcttaactttctgttttaatgaaagaatgaaacatacattcatagttatagaaaagccttaaataactttctaataaatacatacaaaattccaccagaatcttgaaataaaaggtttaaagtttgagcaatgtctcattaataggataatgtgaagccccctatccacaaacttcatagcaatttacttacggtgctactatagcattattttataataagagagtagtaaattctgtttttatctgccaatttcatcttgagttccctgtggacaaaaaccatgtctatatttttcttattagcaactcagtgtcaggcatatggtatagactcaatgttgcttaaaaaaaatgatgtcataacaggaatttgtttctgtactaataagtaacgctaataaggatgaaatcaaggctataagaaaatgggtcttttataggttggtaaaattgatgtttgaataattttgtaattctctctatggctgaagcatgaaatagcaataaattatttctcttggtgaatagttaaaccccaaaagtctgaaaagctatacgaagaaaactaaaataatccctcccctcaaaaaacatgattccaggcaccgtggcatgcacctgtaatcctacctacttgggaagttgagacaggaggatcacttgagcccgagaattctagactagactgggcaatatagcaagacactgactctaaacaaaacaaaacaataacaaaaacatatctttttccctacactgaaaatcatatcccttgttaaacttctttatacttccagaaaagctacggaaaacacataagagtaaatgctgatatgatagcaactcatctgtccagtatgctcaagaacaaagagctccgaataagggaaattcaggagtacattaaatcactctcaagaaaaaaatgtttaaaattgttgtgatgagaactttttaaactgttaaatactctgaaacttctcagttcagaacatattttaatcttttttaaatattcaagttcttattttgatcatcaaattataacatcatgtaatgatacccaaaaacctttttttgtttgttttttgtttttttaagatggagtttcactcttgtcgcccaggctggagtgcactggtgaaatctcggctcactgcaacatctgcctcccggactcaagcgattcaactgcctcagcttcccaagtagctgggattacaagtgcctgccaccatgcccagctaatttttgtatttttagtagagacagggtttcaccatg[136 bp omitted]ttaaacagggctgttgtttttatttactttattattatttttgagatagggtcttgctatgtcgcccaggctggggtgcagtggcataatctcggttcactgcaacctccacctgccggattcaagcgattctcctgccttggcctcctgagtagctgggattacaggcgcgtgccaccacagcccggctaatttttgtatttttagtagagataggatttcaccata[137 bp omitted]tttcttgtaaatactacaccaacaatcaacaataaaaattgatggttttggccagacgtggtggctcatgcctataatcccagcactatgggaggccgaagtgggtggatcacctgaggtcgggagttagaaaccagcctgatcaacacggagaaaccccatctctactaaaagtacaaaattagccaggcatggtggcgcgtgcctgcaatcccatctactcgggaggctgaggcaggagaatcgcttgaacctgggaggcaaagg[135 bp omitted]taaatgggccgggcgcagt[131 bp omitted]tgcagtg[132 bp omitted]aaaaaaaaaaaaagctaaatgatgagaactcaaggatataacgaggggtaacaacaacagacactggggcctacttgagggtggagggtgggaggagggagaggataagaaaaaataactattgggtactaggcttagtatctgggtgatgaaataatccgtacaccaaatcaccatgatgtgagtttacctgtataacaaacctacacatgtacccctgaacctaaaataaaagtttaagaaaaaagtagaaaattgctggttttcgtcaactttcatcttgactcttctacttttaatttgctgttattgacaaagaactgatagttgctttataaaattaagttgtaaaaccagtcactcaaatataatatgcactgtgaagtgaaaaaaatcagcactttatccctcactattcttagatttccaaatggtgaggtcactagaagttcaacagacaaatggaacattactatacttactggaagttgtagtttcccacccacccccttttttttttctttttaaaaagatggggggtctcataatgtttcctaagctggtctcaaactcctgggcccaagccgtcctcccatcttagcctccatagtagatggaaacaccggcgcaccactgcacccagcttatctttaatggaattgctaactagatgtcaaaaaaagtttgactttttgactacaaatttttga[187 bp omitted]gtggcgggcgcctgtagtcccagctactcgggaggctgaggcaggagaatggcgtgaacccgggaggcggagcttgtagtgagccgagatcgcgccagggcgacagagcgagactatgtctccaaaaaaaaaaaaaaaaaaaaaaaaaaaaaaaggtgataaggttatagttagtatgaatttcaatattcatctttgttaaccaaatgatctttgaaatatagttctgatgatattatttccccacaataaaaaccacaacatcaaatttttcctgttaccttaaaatcactgtatcattttgtggattcaagtatccttcatttgcgagtaagtccaaacggaaaaatctattatagccccagcattctccaacttcaaagtcagatgcaaattctcgaatgatattttttgtaggatcattacaggactggtgaaccatctctacacgatattcatatctaaaattgaaaaacagaccattactatacagttagtaaagtaagaataaaaaacaaactcatctaaacattaaggtcactaagtaattacctgagaagaaaccttattgatatacgcagttacatttcttttatcatttataaaaacagcagtattttggggtttttttatttatttaagatggagtttcactcttgttgcccaggctggagtgcaatggtgcaatttcagctcactgcatcctctgactccaggttcaagtgattctcctgcctcggcctacagagtagctgagattacaggcgtgtaccatgcttagctaattttgtatttttagtggagacgggggttcatgttggccaggctggtcttgaactcctgacctcaggtgatccacccaccttggcctcccagtgtgctgggattgcaggcgtgagccaccacacccggccagaaaaagagcagtatttttttgtttgcttttttgagatagagtctcactctgtagcccaggctagagggcagtggcggggtctcagctcactgcaacctctgccccccagttcaagtgattctgctgcctcagcctcccaagtagctgagattacaagtgcacaccaccatgcccagctaattttttgtatttttagtagagacagggtttcataatgttggacaggctagtatcaaactcttgacctcagatgatccaccctccttgacctcccaaagggctgggattacgggtgtgagccactgcgcccagccaaaacagcagtattttgaacgaaccaccaaaacatgaatggcaataggtccttttttcctcgtaaagatgtttaccgatatatcaggtataaaacaacacctcaaaaaataaataaattttgaataaacaagtaattcaaagttgcttttgttttactaatgcaatattttttccatatattcactacatatgtttcctcataaatattgttatttctattatcctttgaggtttatcaccttgcaattttaaaatataaattttgaaatactctactgtattttgccagtacaagtgataagaaagcaaattattgtgtattcagaaaatcaaaggctataaaatttcctaatagaaaataagtatgcagccataaaaaagaacgagattatgttttttgtgcaacatggatggatggagctggaggctattatcctcagcaaactaacacaggaacagaaaaccaaataccacgtgttctcacttatattgtgggagctaaatgatgagaacttatgaacacaaagaaggaaacaacagacactggggtatgcttgagggcagagggtgggaaaaaggagaggagcagaaaagataactattgggtactgggcttaattcctgggtgatgaaataatctgtacaatgaacccccatgacatgagtttacctatgtaacaaaccttcatacgtaacaccaaacctaaaataaaagttaaaaagaaaagaaaaaggaaaaagaaaataagtaagctggacacagtggctaacacctgtaatcccagcactttaagagaccgaggtgggcagatcgcctgagcccaggagtctgagaccagcctgggcaacatggcgaaaccccgtctccataaaaacaaaaaacaaaaaaattagctgggtacggtagtgcattcctgtagtcccagctacttgggagactgaggcaggaggatcacctgggcccaggaggttgaggctgcagtgagccataattgtgccactgtgctccagcctcagtgacacagcaagaccctgtctcaaaaagaaaagaagtatacattgggaaagccaatatattctaatttatatatccaatcttgtaaaattttcaggtttacaaaaagacaaagaagatagcctataaacttttgtgcattaatgcacattatcaagaaaatgaaaagaaaacctaccaaatgggagaaactatttgcaaatcatatgtctgataaaggtttagtatccaaaatatataaagaattcttgaccgggcacagtggcacacacctgtaatcccagcattttgggaggctgaggtgggcggatcacctgaggatacgagttcaagaccagcctggccaatatggtgaaaccccgtttctactaaaaatacaaaaattggctgggcgtggtggtgcatgcctgtaatcccagctattttgggaggctgaggcaggagaattgcttgaacctgggaggcagaggttgcagtgagctgagatcatgccactgtactccaagctgggtgataaagtgagactcaaaatacattaagtaaataaataaattgagacagggtctcactctgtcattcaggctggagtgcagtggtgcggacacagctcattgcagcctcgacttcctgggctcaagcaatcctcctgcctcagcctcctgagtagctgagacgtatgcagggtctcaccatattgcccaggctggtctcaaattcctggtctcaagcaatcctcctgccttggcctcccaaagtgctgggattacaggtatgggccagccagtctggcatattaacctttgactgaacacaagacactgtaaattttactctgttggatgttagatacttcagcaaccttataaattttcttgagcttccttctgggatgcagttaagttacttgaaaacaatttgatcctttcaggtctcacttttgttaggtgggtccagagcagtgttcagtctagggctaatttctgctatcgagacaaaaacttccttagtgttatacccaatcagtgacccatgaattataaatttctccaccgtggcaggttgcaatagacacagttcctggccccgtgtgaacaccagtcactcactattccctctaatcctgtcaaggagttctttccccaatctcaggtagtttcctcagacatatgccctgataagtactctgctgaatactcaaggggaacccattacggatctctagacttcagtctctgcagctttctcctctctggtattttgtccaatgcgctctagctgtattgtcctttctagactctcagcactatcccctcaactaagtctgccagattctccctcagtcccagctcctccctgtgttgcagcctgaaaactctctcaaggctgtaagctggagaaattgtagagttagtttgtgtttctcatctctcagggactactttcatttgttaccaccatgtccagtgtctagaaaatgttgtttcatgaggtctttttttttttttggttgttgcaggaaaatgggtagatctcatccctcttgcttcatgttagctgaaagcagacattccatactaaactaacagatttcatgtaacagagttaaaaaaaaaaatcattaatatgattccagatcccacattgtaaataacatttaacaacctaccacttgttcagtttggatgtaatatcaaagaagatccacaattatctaaaaccactttaaaaaatattcctccttgtcaaaaagtacatttgtggttctcagggactgagggaaacggggaatgggaagtgactgctaaggagtacagggattccttgtggagtaaatagaatgttataaaattagatgttggtgatggttgtagaactctgcagacagatttcatacatgtatttcaatcaaaatgatattttaaaaaaattgaatataaaagcagacatgagaatccagtagtcttcttctaagccagatagtaaagagatttctaaaaacgcaaagcaatacaagttttcttaaaaatattttgtttttagaaaaataccatcctatgatgccaagaacatattattctacatcttaacagacataccaatacagtaattaacaaaaataaaaattaacaaaaattgctagggggaaggtatgtaaatgcacattaaggttgttatttaattacacttcttacttagaagtttcaggcaagccagctgagagctccagaaacacagataagtagtaacctcgcacaactccatttccatcctaaaagaagaataatcagtttgagtgtaaaaaaattaagccacaataaaacaaaatgcagataatatctgatatctagattgagaagtacttctaagcctcaaagcaatggaagaaataattaaaaacaccaatagatttgagttcttaacaactttaaacttttgtgcattaaaaaaaaagtgaaactattaaggcacaaaaatgaagggaaatatcaacaaccacaacaaaggttaagagttttaacatatatagaactcttacaaatcaaccttaataaaaaaacaagaccctaatgggaaaaataatttcattagaaatgagtgaagcaaaaaaaaattttaaaccaaaaattaatttttaagaccaacatacaaaaaggtaataccctatgctgaaagtaattaaatataatttctatatgattttaatattagaattccatataagattctgtctagagattgagaagttgtttaaatctctactatagattttatttttataaagataattactccctccctttttgtttaatttggcaagactcttttaaaaaaagagaattacttcctatgtatttccctagtacttcaggtgtctatgttttaaaagaatcacatttattataactacttgtttaaacatctgttcccccaacgagacaatgaaggctgacaacagagatccttatacatctccagtgtctactgggatatgactacagagaggtacaagtactattaaccccttcatttttagtctactttgcttgaaaggacctgaggcaacttttgaggttcgacatgataatcactcagtagatatcaatgaataaatgactcatcagctaggtgaataaagccagacataaaagatgatatattattgtgtaatgccattatacaaaacttttctaaaaaaaaaaaaataatctgaaactacatattgaaagacttcaatgtgtaactgagaatactaacccaggagggctaaaatgtgtaatagtaaattactggactcaaaaagattatttagcatctaggcaatatcaccaaacatctttaaaggtaaagaaaattagtttattatcagacttttcctaaagaaaatggaattgcatattgaagatacccaatgaaagaaaatatgagccaaggattttatatccagcaatactagccttagaatataaaaggcaaaaactgttttcaacatatgagaactcagggaacattgtttccaataggccttccagcagaatgtattagagaacaaggtgtggacaaacaaacagttgtctaatatgggggaagaaggggaacagggaatgcggacagcatatgtaacaaaaaaaagaagagttaacagttctcagtaatcaaattagtatactacagaactctgaaagaaagaccttggtttcaaaatttattagaaatatgaaaaacttactgggtaaacttttaacctccagcaaagtcctgaaacttgaagaggtggactgtaaacaggatctgctctctgacgcaaagtgctaacgaaaaagaaaaccaaccaaatcccaagatcaaaactgttgtgaaatggcaacaggcaaaaagaaagaccaaccagtttctttgttacatacttgaaatcctagacaaataacaaggtgactgaacaggtcaaaattccactgtaaaagtttagatatgcttacatcctgaaataaagaaaatttaaagatactgaaatattcagcaatatcttttaagtttcaggggaaaaaaaaccctcaaaattgtgacatttaagggaaaaggaatgtatcaccaagtctcccaaaattaattaatgcttcaacaagcagtcttcaccattaaaaataaaacaaaacccagaatgtttcttcctcgcttctctgcagtataatcatcttttaatattgaagaacaagagtacactaaaccttaatacgtgtgggaaaaacctcaaagagactatgttttagccacaaaagtaaccctaagaaaagacaaattaaatgggaagagggataaattctgtgtggctttttttttttttgagatagagttttttcagacagagttttactcttgttgcccaggctggagcgcagtggcacgatctcagctcactgcaacctccacctcccggtttcaggcaattctcctgcctcagcctcccaagtagctgggattacaggcgcccaccaccacgcccagctaatttttgtatttttagtagagacggggtttaccatgttggccaggctggtcttgaactcctgacctcgatgatccacccgccttggcctcccaaagtgctgggattacaagcttaagccaccatgccctgcccagtgtggccttattttgatggcctttgcctattatttggagtttctctcctgaagaccttatagtccttgtttccacttccatgctgccctcaaagacaaattgctaagaacctttgcatgttacgatcttcacttctgatcttaagagaaaaagtagtaaaagctaacaaaattaacatacaactgacaaagcctacacatttcttacaataatggccccttatccacaattcttcactttgagctgagataaatggatctcaatggatttcttcccagcacttttatttctgaggataggtaagagggggctcatcaacctctaactgtccagccccccaccttagtcaaagctaagtgatctctcttatttaaaatggttcctcactttgggcagggcaccgtggctaatgcctataattccagcactttgggaggctgaggtgggagaattactggagcccaggagtttgagaccagcctaggaaacacagtgagaccccatctgtgtggtggcacacgcttgtagtcccagttacttgggaggctgaggtgggaggattgctgcagcccaggaggttgaggctgcagtgagcaatgatcacgccactgcactccagcctgggtgacagagcaaaacccagtctcaaaataaaaagaaaaggttccttttcccagactagagaagcagtcagtctaaagatacaatataatccagcacaaattatctctacatttctaataggaaacttattcttctaagacttctaaagtgagtgacacagttcactagattactgtcttaccaaagaatacctttctggctcttccttatatacacatacaaaaaaaccagaattgtcaaaaactcttacctgaaattctctaaaacaaaagtagctgaatcgtaagatggcactaattcactaaaaaaaaaaaggcaaaaaaaattatttagcttacatgtttaaaattccatttgcctaaaaaagccaagtccctcactagtatcttaaaaactttattaaactaaaatctaagaaatatttttaaatctttattgaacataacattaaatcaaatgaattcataaaaccatcaagtttgcaattaaattggagatacaaatactttataaaagttttttggctgggtgaggtggctcacccctataatcccagcactctgggaggccaaggtgggtggatcatctgaggtcgggagctcaagaccagcatggccaacatggtaaaaccccatctctgttaaaaatacacaaaaattacccagatgtggtggtgtgcacctgcaatcccagctacttgggaggctgaggcacgagaatcacttgaaccctagaggtggaggttgcggtgattcgagattgcactaccacacatctctattaaaaatacgcaaaaattacccaaatgtggtggtgtgcgcctgcaatcccagctacttgggaggctgaggcacgagaatcgcttgaaccccagatgcggaggttgcggtgaatcaagattgcactaccacactccagcgagggcgacagagccagactctgtctcagtcaaccaataaatcaataaataaatactttataaaagctttttttcctaaaagaaaaaaaggcaacacattatataattattaaactaagtacaagaaatacactttaaaaagtactcatggaaatgggaaaaagaaactgacgcttagggtgtgaatctgaattatgaaacagatataaaacatcctttaaaaaatgaaacaacagtcagtgataacacaattaatccccaaacttcctactctggaatggattatgggaaatattaacagacctcaaatactttgaaactatttactagcaaataaatctacacatttttataggatgaatacctcatcacctaaggggcaactgtgatggactagcacactcacactttcttggcaagtcaaaactacttcaagcaactttagtcccatccaatcttcttcagagagaactgtattataatcacagaatggactaaaagtcactttgctgctaactacctttaatcatgtggatggtttgtacactttcattagaacacctcaaaactcattaaaacactatactatgaaaaagactatcatacgatgttttaatagtgttataaatttgatatataaaattacaaatttcccaaaacaataaactgcaaaccatttcaccacatcttcagatatattttctaaagttcaattcatcataattttggttattatcaaaacaagataaaatatacatctatagcactgccacactatgatagtgtctaaagaaattagtggcttgcaatacaatatagacaaataattctttatttcaatgtaagtacgtatagctaaataggtcacgtcttttacacagtaagcagatgtactttgccctgtgattaactgtatagctactatccaaattgactatgtcaagaattcctatgatatccctagtcagttgttatccttcttagaagactcacattcctcatccccatatccttttgcctggttaacccttactatttcttcagataacagattagaagtcacatactcttggaggtttgctctaaggtcttcccattatatgatctcctagcactcaacatacacaaactccaattagcaggaccaatgcaattagtgcctaggaagcctttctggaaccataaacctagtaagagctctaagggagtcttcccagtatagccttcaaatttgacatgtttttgaaattttgtgcaactttcaatcaggtctctcatcaagtacagaatatcctccacaacatgcaaagactttaatcaatccccagttgcctgctaatctgcatattatttcttctgccatgtccagtgtaatttatttcctgtgttgttgttactgttatttctgctctaagtccagactatcattatcatattttattggccattaagggtcaaaagacttcagcagaacccaaattaaacaacaagagatgccattttcaactcagaatggtgaagtagaaagcttccaggctaaagagcataggttactaacactcatgaaccaagagagtacagtccagtttaccctagtctcacttgctaggagaaaatgaccacattcagagcacagaaaacaggtactgtgatatacttttacatatgtacattctcctagggaaaattttttggacacaaatagtataatgacaaattagtggtatggggcagcattaaacaggatacttacttcccctatcaccagttaccacattaattttattactgttccaataacctgtttttctaaatcataattataaacccaaagagctctgtattatgcttaatgctagcacttaacacatgcctaaaatatagctggcatatattcactgaatgaatgtttataaatacttgctggcagattcgtagagttggaaatatttgctcaaaaatttcttttgcgaaagaaattactttgctttttaaatttaaattttatttatttatttatttatttatttttttgagacgcagtctcgctctgtcacacaggctggagtgcagtggcgcgatctcggctcactgattttgcattctttatatgtatatacaaagctattgctactgctaggccatctaattccaccaccacatctccatattatgctcattcatttagagattatcttcaatcatactgatgttatcattctgtgtctgcagatgaggcactgctttatcttttcatagttttaaaattttctcctcctctcttagaagtgtagactgctctggttatgatgactggattcatctcatgatggtgtcagtgaatctttgtcttcacagaatatgggaaactaccctcaaaccatctctagcccaggaatctggaagtcactgatctgcaaatcttcagaccagtaacctcatcataacttcatcaacaaagggaaaaaagggagaaccacaagtatccatttgtttcttaaggaaataaactgctgagctatataaaaactggttctccttatcaacttgactatttctccctgaaacataaaactctctatgaactgacagctatactattgtatcttttattttttcttttctgcctcagcctccggagtagctgggattataggcatgcaccaccacacccggctaattttgtatttttagtagagatggggtttctccatgttggtcagactgctctggaactcctgacttcaggtgatccgcccgcctcggcctcccaaggtgctggggttacaggcatgagccaccgcgcccagcccacagtaaaatatttagttcctcttctcccatgcagcacctacaacaatactgggcacatagtctttaataaataacacttcactgatttagtgaccttttcttctccattgtggctccatcaccaattactaactgatagaactaaaggcaatagaaacaccactgctttgcatatctaaagtttcatgtgtaacttaatgtcacgaatgctgatctttcttatttggccctcttttcctgtatgttgcaactaataaaacaggtttctaataagaattaaattaaaagccaaagtttccaataaggtagtgagcattactggagaaagagagaaggccctgaaagtgattaattaacagactagcgagcattgttgcctgcctgatgagctgctgaaagtggtataagaatgggaatttacatacatcaatggttcccaaactttagtgcagtattattacttagagtgctcaagacgcatttctgaataccacctctaaagattctggggacattggcctgggaatttgcatttcagacaaatgccacacatagccctgacttaggtcatccatgcaccacactttgaattgaaaaatactaatttttatatatgacccttaggtcaaaatctgtttcattccacaggggatgaaatggttcagaaaacaaatcttcaaaactgaaatagctgaccacagtatcaatgaagcagcctagggattttggtgaacattcttcaaccaaatctacttaatgacagcaaatacatagtccttttaataatattcagtgctgtcattcagaaatgagatttaaacaaaaaagtcagtgctttaaaaagatatgaatattttatgaggttgttaatcaaaaagaaaggaagacttctactggtcaatgagaaccactggagttctagctgtcagaaaaactttgcccttctgtttataggactgtggcatctataacgagtaagaagggcttataacagtgattctcagtcaggggtgattttgtccccaaggacatttggcaatgtctggaaatatttttgtcacaactgcaaggtggtggggtggggagtgctactgggatactgctaaacatcttataaaacacaggaaagctcaccccaccccacaaataattattctgcttaaaatgtcaacaatgccaagattgaaaagccctggcttatatgatatactctagtacaatgaatgcggccaggcatggtggctcacacctataatcccagcactttgggaggtcgaggcaggcaaatcacttgaggtgaggagtttgagaccagcctggccaacatggagaaaccccgtctctactaaaaatacaaaacttagctgggcgtggtggtgcatgcctatattcccagctacccaggaggctgaggtgtgagaattgcttgaatccgggaggtggaggttgcagtgagccgagatcacgccactgcattccagcctgggtgacagagtgagatggagtataataataaataaataaaataataaattaaaaaaataaaaaataaaatagtacaatgaatgctctgtggtcatcagaggcatcacatattagaggaaaaagaaaaggcagctcaacatataaacatttttataacaaagactgttttctaaatgtgccacagccctcaccatggtaggaaaacttgatagtattccataagtcatctctctaagataaagtctgtcacaccaaaatgtttatctgaagcagtggcttcacccctcatcatagaataagctaaggagattttaaaagaacaaactgaaaatgtccatctgaaccctatgtcacaggctgaattgtgtctccccaaattcccatgttaaagccctaacccccaatgtgactgtatctatagccagggcctttaggaagataattaaggctaaatgagttgataatggtgggtctaatacaataaggcttgtgtcctcataaaaagagaaagagacaccagagactgatctctctccaagcaagaacagagaaaaggtcaggtgaagacacagaaagaaggcagctgtctgcaagctgaggcaaaaaagtgaattttctgacaccctgatcttggaattcttgtttctcgaactgtgagaaaatacatttctgttgtttaaaggcacccagtatatggtattttgttatagcagcccaagtagactaatacacacccaaagattttctttcaaatggcctggggtatggtatgacccagcactgattaattttcagccaaatcccaagtgattccaacatctagtcagaaaccaccagtctaacaccacagaatgattacaaacatgcttgaaggaatatgctgttcagaaaaattctaaggtttagcccaagatgaaaactaggatactttttgccataattatttcctctctctatcttttagtatccggagataacatggcgtcaccttcaaattcttttggcatttcatcagtttctgagttttgtgttaggagatatagttcaattcaaaaggtacactgatgaagctaatgtaatcaattatttttttctatactacggaagatggagctcttggaaaaaaaaatgatttctagttcattgtcattttctcttaagagtcaaaagtatcagtctgtgagacttttcaggagaactagatttgtatgtatacaacagagcttgccagaccactccattataaacaagaccttaaaaagctatggagtggccaagtgtggtggctcatgtctatgatccctagtaatttggggggtcaaggtgggaaaatcacttgagtccaggagtttgagaccagcctgggcaacaagtgagaccctatctataaaagaaaagagagagagagatggcattaaaaaaaaaaacattcttttgaaacaagtatatgcatttccacataaatttcaaatgaaaatgaaattaaaaactgtgtcatacctggtaaagtctggtggaacaggagtggtaacaaaagatgccatgggcttccgatgaacttgctgaaacatcataaggatctctgagctcttagatatcaactcactcttactacaagaccgcaactgtgtgaggaaaaaaattatctgaacaaacaaaattactattcactgccacctcaaaattcttaagaaattacaaattattctgattataaactgaaaaaaatgataaaaataactcaaagtgagcttgagaattaagaatgtacaaagaatctaggtttatttctataatattctaacagtaaagtcaatgaataagtatacttaatactaatgcatttttctctccttacattttaggataaatgaggttttaagcaagtacaaatatactttcaggctggta[132 bp omitted]acctccgcctcctgggttcaagcgattctcctgcctcagcctcctgaatagctgggattacaggtgggtgccaccatacccaggtaatttttgtattttttagtagagacagggtttctccatgttggtcacactggtcttgaactcctgacctcatgatccacctgcctcggcctccccaagtgctgggattacatgcgtgagccaccgtgcccgaccaaggtgaaagcttttaaaagcaatttctcagattgtattctaggtgacagaatacaaaacgtacacacatacacccgtgtgtacacacacacacacgcactatctgatactaatttgggaaacactattttgggaaaaagtaacaaatctaacttcagtaacataaccatggtagataaaagataagactactaattttttcttcaaaaaaaccagtttgaagtaactcccaattctgccactgactaattacataactctgagtctgtttacatacaaaactaaaatagtaatatccaccactgcttacttcgtgaagtttgttataaggattatgaagctatagtgaaaaagctttgtaaactatctgttatgtgctgaattttgtgcccctttcctccataatttatatactgcaggctcaacctccagtacctcagtctatctggagataatctttaaagaggtgattatgttaaaatgaggccactggggtagggccttaatctaacatgactggtgtccttattaagaggaagagactctagggctgcacaaccacacagaaaagtccatgtgaggacacagtaagaaggcagtcatctacaggccaaggagagagacctcagaagaaacgaaacctgccaacacctgaatcttagacttccagcccctagaatactgagaaaacaaatttctattgtttaagtctcacagtcattggtattttgttatgacaggcctagcaagctaatatactatcaaatgccatatgaatgatattcataaacccacctacaggtgagtttatatcttttaaataacagttgcttaaggctcaccaaaaataacatatcatatggctgggcacaatagctcacacctgtaatcccaggactttgggaggctgaggcgggtggatcacttagggtgaggagttcaagacctcatgacctggctagttcaaggcctggccaacatggtgaaaccccatctctactaaaaatataacaattagctgggcgtggtggcacgtgcctgtagtcccagctactcaggaggctgaggcacaagaattgcttgaacccaggaggcggaggttacagtgagccaagatcacgccactgcactccagcgtgggcgacaaggcaagactctgtctcaaaaaaaaaaaaaagtatcatatatcatatgatatatatcaaagtttatagtcttgggttaccaagaataatgatatcatgtttgagctactgcatcaaccaatgacataatggtaagtggtaacagcagaaaacaacaaacagctgcatattttgtcattcatattattatgtgtcaggcattgcccaaggcattacggttttttgaacaatttatataaaatgatctaaagttatttgaactgtttgcttaagatttttaaggtatgctaaaaatcactgtgtatatgtacatacatacacacataatacaaaaaaatttaacttatattaattgaatgcttactgtgtatatccttccttgacaccatttcttccaaaagcaacttgctcccttcaacagaagtttattatcactatacatgtgtttccacaattactatgtgtgtacatacatccataaacaatgttctgaatgttttcaaactttacataaacactatcaggctatatcaccatgta[135 bp omitted]tgcctta[133 bp omitted]ctctgaaagtactgagatcacaggcatgagccaccacgcccggcctatttctttacttttttaaacagatgggtcttgctatacttcccaggcgagcgccgtggctattcacaggtacaatcatagcacactgaagccttgaattcctgggctgaggcaatccttccacctcagcttcctgagtagctgggactacaggtgtacaccccatctcaatactgttttgttaaaaactaagacaatggcctaggcctacacatggtcaggatcatcaatatcaccaccttccacctccacatcttgtcccattgaaaggtcttcacgggtactagcacatatggatctacaatgctaacaatgccttcttctggaatatagtcaacgtttttttaaaaagtaggagtaaactctagaatatattctagaataatgaatggtatggtatagtaaatacataaaccagtaacacagttgtttattatgcttatcaagtattatataccatacataataatgtgttatatttttatacaactagcagtgcagtatgtgtgtttacactagcatcacaataaacacatgattaatgctttgtgctactacattacaatggctatgatgtcattagacatcactactaggcaacagaagtatttcagctccattttaatcttgtgggaccactgtcacatatgcagtctgtcattgaccaaaaggtcataatttgacacatgtttgtatatgggagatgtgtataggttatatgagaatactatgccattttatataagggacttgagtatctgcggattttggtatccattaaggtcctggggccaatgccctacagatatatatgtgtgtatgtaaaaagaaaaggaaaaaagaatggggataatgaagaaaaataagagtatttagtaaatatttatgtgctgaatcctacaagccaaattgtcaatcaagtacaaagataaaataaaaatattttcagacaatgcagtcaagaaaaatgtgttctgactacccttcctggaaagctactgagggaagtgtgatgttaaaacaaaacaagtaaaccaagaaagtggaaaccataggaatcaggaaacatgagattcaatacaagaaagatgtgaagggaattcccagaatgattaagataaaaatctcaggagacagctgtgtataaggcatagagagaaattacaaaaagcaaattccagacaagtgaatgtatcagatatttatgcaacactacatattttatttactcatttactatatgcttcatattcacccaccctaatctaaaatataaactctatgaggacagaattttaccattttgttcactgctgtatcaccaatatctacaatgatgcctgctatctatttaggacttaatatttcctcaataaataaaaatgctaaattttagagtaataatcgctacatgtaaagtaactggcaataatatctcaaagccaccacttaagtcacagtgtggggagattttaacctcttatacattcagatttctatggaaatagttctgttcttacaaagcagaatgtagttctaatgcagttcccaaacatgaagaaaaaacttggcaagaatcagctgattcctaatttcataaaaatctccattataacacaaaagatcaacagatcttttgatctcatacagataatctctgtcaaaaaaaaaacgtttataatatacagagaaggccgggcacggtggctcacgcctgtaatcccagcagcttgggaggctgaggcgggcagatcaccaggtcaggagatcgagaccatcccagctaacatggtgaaaccccgtctctactgaaaatacaaaaaaattagccgggcgtagtggtgggcgcctgtagtcccagctactcaggaggc[136 bp omitted]gagaaaaaaggataaagactatttcattacatttaatatttcatcacctggtgctccacctcctgaagtaaggattccaaaagctctgtttcttgggttagagatgtcttctgacctgatgaaaaatagtgaatcatcaacacttgggttcattattggtttaagaatgaaattaacttccaatgaacatatttaataacaagaaatacacttcaagtaagcaaaaattcttcattacagctaccctaaaaattctcattcaactttaagaggctgaatattatagtagccttgaaaatggaacttcagaaccaattctaattagttttagacaagataccactgagatcaaattcatctaagaaacgaaatgtgcaatgacaatatactttaagcaaaaaatttacttttctagattttcatattcccttgggaagaagcaataacatgaatttcattcaatcagctattctgaaatcatttttcaccaaatttaactgtggcttaaaagagaatacaaagtgggccagatttttaggttaaatgtcagcaaaaggtctgtcctgtgaatatacaaggacctgtttaaaaaaaaaaatgcccacagaggtgaacagtctcaaaaagttggagacagaaaaggataaacaaattattactggccggggccatggctcatgcctgtaatcccagcactttgggaggccaaagcaagaggataacttgagcctaggtatttgagaccagcctaggcaacatggtgagacccagtctctacaaaaaagtaaaaaattagccaggagtggtggtgcatgcctgcagcccaatttactcaagaggctgaggcatgaggatcacttcagcccaagcggtcaaggctgcatgcagtcatgcaatgagccttgattgcaccactgcagtccttcctgggcaacagagtgagaccctgtctcaaattacaaacaaaaaaattataattacagaaattatccttatagaaaaggaagaaagtgctttatatgttttgaaacaaaaagaagataggtatgcttaccaaatcaggccattttctttgtaaacccaaaatttgaaaaactggaagtacatccatgaggacagcaaaagttttatcaatctgtagtgttatttgataaggaaaaacatttaataggtagaacttttatttattttatttatttattttttgagatggggtttcactcttgttgcccaggctagaatgcaatggcacgaactcagctcaccgcaacctttgcctcttgggttcaagtgattctcctgcctcagtctcctgagtagctgagattacaggcatgtgccaccatgcccggttaattttgtatttttagtagag[143 bp omitted]agggtctcattctgttgcccaggctggagtatagtggcgtgatctcggctcactgcaacctccacctctcaggctcaagcgatcctcccacctcagcctcctgagtagctgggactacaggaacacactatcacacctggctaatttttcttttttttttttttttggtagagatggggtttcaccacattgcccaggctgggcttaagagatccacctgcctcagcctagaacttttatttttgaaacaaaactcagaatttctaggttgcaaaaagagttaaaataaagtattagctagaatctaatattatcagacataatttctactataaccacatcccacaatcctaaaacattagcctatggacaacattacaatacataattaaacttaaaaatgagtggcagaggccgggggtggtggctcacgtctgtaatcctagcactttgggaggccaaggcagacagatcacaaggtcaggagtttgagaccagcctggccaatatggtaaaaccctgtctctactaaaaatacaaaaattagcagggcgtggtggcacgtgcctgtagtcccagctacttgggaggctgagatagaagaatctcttgaacctgggaagcagaggttgcagtgagccaagatcacgccactgcactccagcctgggcaacagaacgagactccatctcaaaaaaaaaaaaaaaaaaaaattagtggcagaggtcaggtgtggtggctcacgcctgttatcccagcacttcgggaggcggaggtgggtggatcacctgaggtcaggagctcaagactagcctggccaacatggcgaaaccccatctctactaaaaatacaaaaaattagctgggggtggtggcacgtgcctgtagtcccagctactcaggaggctgaggcaggagaattgcttgaacccaggaggcggagggtgcaatgagccgagatagtgccactgcactccagcctgaatgacagagcgagactccatctcaaataataataataataataataaattagtggcagatattatggtatgaattaaaaatctgaggcttataagactattctaaagataaactaaccctgaaaatatccttttccccacctcttatccttagaaagaatcctatttaatcataaaagctaccttggaaatcacaaattataatttttcataatgaaaaataatttgaaagccacaaaagcagggcaagttcagttattagaaagggaagttatttcacagttatacaggtagtaaaattaataaacttaagagatctgtactgtggtattatttgacttttagttgattcaattaaataaatgaagcaatgaacaaactcactcaagaaaaacaagaccacatgcaaatgtttatttggctacgactgaagatcacatcaacagtcaagatcccctcaattttaaagtcctaatacgtatcaacatccagtactctacatggcttaatgaacttaaagagatctcaaatattatctagagttctgaaaaactaagatcacctatatgtatgactgcaactgaggatctaagaacaattacgattttcatttacatgaaatatataagtggcattgtgaccagtacaatcaatacctacaggttttgtctaattgctccactgggtggatgaactgtgctttccaatctaactactagaagaatgattgtttaagactatttgctacttggtctgtgggaaaaaaactaaaaatcagatattaaatagtataggattataatagaaaagcaattcatgaaatgatatacaaatatacaaactcaaagatatttgcatctcatttttaaaaagttaaaaataaaatggataaaatcattattttggatgacacaaagacatggctaaaatcttggagaatcaagatagccaaaaaaaaaaaaaaaattctttgttcacaccttatttaaagtatatatatttcactttggactatgataaaaaatgcaaagctggtttttagtcagcaaaacactggaaggactaagatcaccaaaacaaatcaaacaaaacaaaccatagcattggattaaattcttacttaaaatttaagttcaataccaggctccacaatcaaagaagaatgaaggaatcttcgaaaagcaaaaaggtcagcaataaatataattaagcatatgtaaaatgaaccctactagaaatcaaaagctgagactttaaatctctaagaaaatgctggcaggggatgacgccgatgtttacaaatgtcagtttcttcatccccaatgaaaatggatggaaaggatatggaacattagtagaaggaattctgttagatttggagaaaaagctacctaacaatgatgcccactggccattaggattttcatccaaatggctatgaaaacttggattttcatccaaatggctatgaaaatttttctctcctatcatttctaaatacaagtctaacatttatctgtctaaattgtaacaacatggagttgcctaaaatctcaagattccttcctaggatgatcacccttattcttcaaagactgaatctcaaagaagctgaaagcaccaggtaccccagcagcatacataaacacttacccatcagtgttataagcttattcttcagctgtgtgtctaaccgtgcaatcatcatctccactgcattcctaatttcccgaacacgctcatcttttgcatttcttacagcttctacattcctttcctagaagataaagaggtaagaataattttaattgggtaaattttaaaaacagaagcaccacattataatattgccaagaatagataatatgaaaaaggtagttagaggaaggtcaaatggaaatgacccaacttgcttatatttcaaaatggcagacatgcaatcaaaaacacaaattttctgcataaagaatgttataaatgatcacttggttcttgattcctaaagaggtaaaacaaagaagacatctgcttttaatttaggatatggtccacaaacttcattttaagttaggaaatggtccataaacctcatttatgactgtcattctaacaacttgaaacaaaatgtattctaaaaacatgcttagtatttcattcttgggggcttatcacattttttcacagaaataacattataaatagctcactaaagctgtttgacctaaacaatatctaaacagtaatgttaaatattgcactttcaagtctgtggagttctaaatcaggacatcacaaatagttcattgcttagtaaaagaaactcacccaaaagctggggatccaaagagtgtataacttaatgaatgactgtaaaagtcaatactgattctgtttagaagtaaattattggggccaggcacagtggcttacacctgtaatcttagcactttgggaggccaaggcaggtggatcacgacgtcaggagtttgaaaccagcctggccaatatggtgaaaccctgtctctactaaaaatacaaaaattagctgggcgtggtggtgggcacctgtaatcccagctacttgggagggtgaggcaaaagaatcacttgagcccgggaggtggaggttgtagtgagctgagatcgcgccattacactccagcctgggcgacaagagtgaaactccatctcaaaaaaaagaaaaaataagttaattattgactctgtaacaaacagactttttaaattcactgattttctaattctgcataagtggtaattctctgactccaactgcttccttacaagccaggggctttgtatgcaaatttctcagatactctgaaatttatggaatttgactataggtacagcctatcaaatttgcaaatcttgaaaaccttgatttcaacatctgattaacttatattatataaatatattattatatattacagattaaaaacaaaataattatattttagtagtagtcttaccacttcttgaactaagctgatcagttccatgagacgccgacgaagtttggctacctcttcattcactttagtgacgtgttgctcataaatttctgccaaaggtttaaaggtatgtccgccatgctatttaaattagagtagctttagaacactttcacatatctcatctgcatttacattcctttgtaacactctatggacactaataaactggtaaatctctcaaatgaactttaccttattagctaatttaattttgttgaagcaggccagtgcccgcttaaaatcacttggtccaagtaggaactctttcaagattataaataaagggctttagcaaaatattcatttaactagaaattaacttattaaaaagaaccaagatctttaaccacagcccaaatcatctgccacaaccttatcagtcagtcactcttctctaaggcaaactagtcttcttccatgtcctcaaacttctttccaccaggactttacaaaaattactccctcttattaaaaaataattattagccaggggtggtggctcatgcctctaatcccagtactttgggacgctgaggagggcagatcacttgaactgaggaattcatgactggcctggccaacacggcaaaaacacgtctctactaaaatacaaaatgtagccacgcatgttggcgcacacctgtaatcccagctactcaagaggctgagacatgagaattgcttgaacccgggaggcagagcttacagtgagctgtgatcgggccactgtactccagcctgggtgacagagactctgtcccccccaaaaaataataattttttaataataaaaaccaaaaaaaaaaaaaaataaaaaaaaaaaaataataataataataataataatgctgggcatggtggctcacgcctgtaatcctagcactgtgggaggctgaggcgggtggatcacctgaggtcaggagttcgagaccagcctggccaacatggtgaaaccccatctctactaaaaaacacaaaaattagctgggcgtggtggcatgcgcctgtaatcccagctactcaggaggctgaggctggagaaccacttgaagccgggaggcggaggttggagtgagctgagatcaccccactgcactccagcctgggtgacagagtgagactctgtctcaaaaaaacaaaacaaaacaaataataataataattctccatcttccctctcccatcttggtttgtcttaatcctactcatcctttgcacttagctcagatttacaggatcagctgctatagttatgcatcctcatcagctctctgtatttattcctataatttatcaagccaattgagtatgtaattgtttgatatgttcatcaccaaatccctagtctttaccacagctgaatgaattagaaagacacttgaagaaaaagcccaggatacaaaattaacaaaagcaatgaacccattttccatcccacagagttactacagagacagaagactgatacaagttagcctcacaaatccagttgcattcagctcaaagaacaatttttatagctaactacctaaaaataattttgatttgtaaccagaattattaaattttaatataagaaacctcctataagttcttactagaattgtcttatttagccaaagtatcccattattgtctccaaaaaagatgtagatttttacatgttcactttaagtatagaaaaaaacatttctactgtctcttacaaaacctatgtatttaaagtattaaatgtgagaacttaattttttctagttagcacattaatattcaaattctagcagaaagctctgaattgagctctactcaaccaatctggcctgccactctctccgtaaaacatactgactgatgcccacagaatgatcaattcttatagcaactctagatacctacccacttccatttcacccataacttatttttcctaagaatctattgtgtttattctcaacctatttatgccaattgtacttattattgtaaggagatcatttaattaagtattcagaggctgggcgcggtggcttacccctgtaatcccagcactttgggaggccaagtcaggtggatcacctgaggtcagcagttcaagaccagcctgaccaacatggagaaaccccgtctctactaaaaatacaaaattagccaggcgtggtggtggcacatgcctgtaatcctagctactagggaggctgaggcaggagaatcacttgaacccgggaggcggaggttgcagtgagccgagatcccaccattgcactccagcctgggcaacaagagcgaaattctcaaaaaaaaaaaaaaagtattcagtaaacaacagaacacgactttaaaataaaaaagctgcttctaagaaagctaacttcaatgcttcaggctcaataatggtagactgtctttaaaaactgctcttgaattcaattggaaaaaataatctaaaaaataaaaaataattataagatctagataggcgtactcatgttgtttcacaagtgtctaagttcgtgctccattttaaaggaactaaaattggaaatgttggccagtacatctgatcaactgacctttaatgaaaaaagtgacctagatcctacaacgaaaagatctgcaaatgaatagaggatatgttttataggtgttacagattaaaatatttacataaggggtccatcaaaccacacaaacaagattcttctggaataaaagtacaatacctttaataaagcgtatagaaagcagatgcattttaactttcattctacgagagcataatgacactattttctatctgaataagtatttcagtgccttctagcctctaacttaaaaaaaatactgaatttgttctgctcaccattcctccccaaagtgcacactgatggcagatacacttcttacaagtccagcaaaatacactaagtttttcatggtgattttcacatctatacattatgaaaagaaaatgaagttataaattaaattggaacataatcacctccacaaattcttaagcttgggcaaacaggtcagttttaaatgattatatctcaagaaacacagtataaaatgtactccatggcttctgaaaaggaagctaaagaagtttatgcggacaattttttgtaaagtactgttttcattgatctggactttataatcacatgcgaaatacagatttgcttcttaaaaacataacacatattgcatcatttccacacagcactacagatgatatattctattgtactactacattttgggcatgtgcttaataatcatattgattatgcatctatacctacatgagcatgcacaagtacttttcctacatgtggtcaacgataacaataatcaagacacatgattaactgcacgatttaatactagaccctcatggaaaatgaacaactcaattttaaatgttcttttaaactggatattcacatgaaaaacaataaagttagactctgttatggattaactatgtcccccctcaaattcataggttaaagccttaacccccagtgtgaatgtatttgcagacagagcctttaaggaggtaattaaggttaagtaaggatcacaagggcaggacccaaatccaacaggactggtgtcctctataaagaggaggagacaccaggcatgcacgtgcacatagcaaagatcatgtgaggacagagctaggtggtggccatctataagtcaaggagaaagggaggcctcactagaaaccaacactgctagcatttaatcttggacttaacacctatcagaactgtgagaaaataaatttctattgtttaagctactcagttagcagtattgttatgaaagacctagcagactaatacagaccctcactttataccatatacacaaataaactacaggccgggtgcagcggtggctcatgcccgcaatcccagcactttaggaggccaaggcgggtggaacacttgaagccaggagtttgagactggcctggccaatatagtgaaactccttctctactagaaatacaaaaaattagctgggcgtggtggtgcactcctacaaccccagctactcagaaggctgaggcatgagaatcgcttgaacccgggaggcagaggttgcagtgagctgataatcacaccactgcactccagcctgtgcaacagagcaagactctgcctcaaaaaaaaaagaaaagaatgaaggtttaacatccagaatatataaataacacctgtaactcaacaaataaactttaaaaactctaatttaaaaatgagcaaaagatctccagtaagcatatgaaaagatgctcattactactaatcactagagaaatgtgaatcctaacctcataccatattaggatggttgctatcaaaaaaacaaaaaagagcaagtgttggccaggatgtggagaaactggaacccttgtgcactactggtgggactgtaaaatggtacagtcactatggaaaacagtatggagattcctcaaaaacttaaattaaaaatagaattaccacatgatctagcaattctacttctgattacataaccaaaagaactgaaagcagagtctcaaagacatgaacatccatagtcatagcagcattattcactacagccaaaaggtggaagcgacaccaattttcactgagagatgaatggacaaaaaaaatgtgacatatacatacaatataatattattaacccttaaaaaggtgggaaattctgacacatggatgaaccttgaggacattatgctaagtaaaataaaccagttacaaaaagagaggtactgtatggttccacttatatgcagtatctagagtactcaaacagatagaaacagaaagtacaatggtggctgccaggggctggtgcgaagaaggaatggggagttgtttaatgggtacagtttcagatttgcaagtttaaaaagttctggagattggctgaacatgtgaacatgcttaacataactgaactgtacattaaaaaatgattaagatggtaaattttatgtatattttaccataattaaaatgttttaagtattctcttgtttataaagtagacatactcttgcaatttttttttttttttttgagacggagtctagctctgtcatccaggctggaatgaagtggcgcgatcttggcccactacaacctccaccttctaggttcaagcaattcttgctgcctcagcctcccaagtagctgggattacaggcacatgccaccacgcccagctaatttttgtatttttaatacagacagggtttcaccatgttggccaggctggtctcgaactcctgaccttaggtgatccacccaccccggcctcccaaagtgctgggattacaagcatgagccactgtgcctggcccactcttgcatttttcaaaaagcatttcattgatgaaggacactgagcttagagaaaatacttacataagtttatattttatatttctaattcataagtaatcagaatataaaatgggaaatgaataagagttagaatacatcaggtactgtttggaagctcatttagcaagacttccaaaagaccaaatttataatatagcttttacaatatagaaaatttgccaaaactcctcttaattaacagcctgtattcacttgcagcaaggggaggccagtaggcatcaaacagcaagtaagaaagactagcaggttagcaaattgtagcagtctattccttttgagaggctctaatagaagaggcccaaaaagaggtaaaaggtctttccaaacagtaatacccaccacttcagaggaaaaacacctaagtgttcaccaaagaaatgtgccattgtatagaaaagaaattaaataattatttttggtgagacctctacaatgctacaagtgacagaattccttaaaagtccagttaaacttgaatagcaggtttttggttttgtttttgtttttttgggagatggagtctcgctcgttacccaggctggaatgcaatggcacgatctcggctcactgcaacttacgcctcctgggctcaagcgattctcctgcctcagccccccaagtagctgggattataggcgtccaccacgacgcccagctaatttttgtatttttagtagagacagggttctccatgttggccaggctggtcttgaactcctgacctcaggtaatccacccacctcggcttcccaaagtgctgagattataggcatgagccaccacacccgcccgaatagtaggttttaattctgattatgcattaatgtgttatactaccataattaagcctctttctttttttttttttttttctttttttaagagatgggttcttgctatgttacctaagccatcctctgggctcaagagatcctcctgcctgagcctcccaagtatctgggactacagatgcacaccaccacaccctgttctcttatttctatggttctatttcctcagtataatgaagaaacagataaatttttttctaatgacctgtgaggtttcaacctcttgctttaccatgttgtgactctacagaaagtgacaaggctttatttctaaacattcaggggtcctggaatctcacctaattcaagttattttattattgctggacagtgaagccttacaattaaccatgttgtagcttcttcatctataaaaaccaatcactgccacatcactctttcctttctttacctgctccccataacaactctccagatatgttcaaaattcttcaatcatggaacataagaccatttattcattcttgtcccttaaatgacttaacactgtattatcactgtgtccccattaaacagttaacagaaatcatgtctcatttacctttgtatgcctatcatctagcaaagtactttctgtgtggggggaggggagggcgagaggtatctgtgtatacatggcatgaaataactgttgttaaataaacacaataagaatatgttacttaacagtaacagcgcatgactgaaagaattaaaaacaagaaatataacactacttattcataaataactaaaaggcaactaccaatatagtgtcattaaacaatacaaaggcaaaatccattcaatattgaacaaagaaattgaggacatacttgtccttttcattttcttcatgtttggtgagactgcagagttgaagagtatcaagctgttgtgttacttcttctgcccaacgacaatttactagttctcgtagctggagtggagcactggggagaaaatccatacacatacactaattcaggaatttgagattattttataaaataaatacgtttctcaaaatagagagcacaataatactcataccataacactattttttttttttaagagatgagtctcactctatgacccagggtggaatgcagcggcatgcatgatcatggttcactgtagccttgacctcctaggctcaagcgatcctcctgcctcagcctcctgagtggctgggactacagcagcacaccatcaaacccagctaattttaaaattttttgtagagacgggaatcttgctatatttcccaggctggtcttgaactcctggcctccagtgatcctcccaaagtactaggattacaggtatgagccactacctggccccataatactattaaaactaaaaaaataaaaaataaaaaaaaagacaatgaaaaatattatctgtgacttattttcaccacattaacacgtcatttatgaaaagaaacaaaaagctaaacaaaaacatatgattcagaatatggactgaattctcaacttctgagtctaaagctgtactgttggcgtagtggctcgcgcctgtaatcccagcactttgggaggctgaggcaggtagattgcttgagcccaggtgttcgagaccagcctgggcaacatgatgaaaccctgtctctataaaaaattagccaagtgcaatggcatgtgcctacagtcccagctacccatgaagctgaggtaggaggaccacatgagccagggagattgaggctgcagtgagccaagatcatgcctctgcactccagcctggggaacagagtgagagcctgtctcaaaaacaaaacaaaacaaaacacaaatccacagctgtgctgtccaaaacgatagccactagccacatgtgactcttttaagttaaaattaaataaaaataaaattttggccaggtgcagtggctcacacctgtaatcccagcagtttgggaggccacagcgggtggatcacaaggtcaggagatcaagaccatcctggccaacatggtgaaacgctgtctctactaaaaatacaaaaattagctgggcgtggtggcacgtgcctgtaatcccagctacttgggaggatgaggcaggagaatcacttgaaccagggagtcagaggttgcagtgagccaagattgcgccactgcaccccagcctggcgaaagagtgagactccatctcaaaaataaataaataagtaaaatttcatcatatagccacactagacacatttcaagtgatcgacagccacacacaactagtggctaccatactggacagtgtagacatagaacactttcatcattataaaaagttctacttgataatgctggtcttataagataatgtaagaaaggtgggacgaggcacagtggttcacgctgcaatcctagcacttcgggaggtcaaggtggtaggatcccttgagcccaggaagtcgagaccagtttggccaacacagtgacatctcatctctacaaaaaataaacaaaattagctggcatggtagcacacaccagtggtcccagttaggaaggaggttgaggtaggaggatcacctgagcccaggaggtcgaggctgcagtgagctgaaatcacgccattgcactccggcctggacgacagagcgagactctgtctcaaaaaaataaaaagaaaagtgaatacaaaaagaaaaatggttaacagatggcactccagcattattttttgaaaccaaaagtagagataacctaaatgtctctcaatatgggcataaataaatcaaggtatagtcataaaactgattatcagtcacttttttaaaaaatgacttatgtatacatacaatcaagaaaagatatctaccatattttacatgaaaaagcaaactgcaaaacaatattatatcattggtacattttaagaaaaagcatatgggaatcacatacgcatatatatatataaatataggcacaatcatactggattagggcattacaaaatacatgcacaaaaaacagtctagaagaatagataccaaacccaacaatttcttctgaaagtattattaagtgagaagacagggtagggagtatcagaatcagaaggctttttattttattttatatttatctctaccatctggatttttttgtttgttttttgtttttatttttttgagacagactctcgctctgtggcccaggctggagtgcagtggcgtgaccttggctcaagtgcagcagtacgatctcagctcactccaacctccacctcctaggttcaagcaattctcatgcttcagcctcctgagtagctgggactatagtcgcgcgccaccacgcccagctaatttttgtatttttagtagagacaaggtttcactatgttggccaggctggtgtcgaattcccgacctcaggtgatccagccgccttggcctcccaaagtgctgggattacaggtatgagcgagccactgtgcccggccaagctatctggatttttttaaccagaaaacattaaaattttttgcttaattataaaagataaattatgccctaactatctggattttttaaccagaaacattaaaaatttgttgcttaattataaaaggtaaattaagaagttatacaatgattttctgagaggcagagtacaacatagtaaacgtaattttaagtcacatgaattagtccctgcatttctttttctagtcaaattgcttatttctactcaactatcttcacgaagaagagaaatgggcagactgcaggaaaactgcctttatgaatcccaaggcacattctgatcttactattttcaaaattcacaaataatcgtaaggaaacacttaccggcaatgaggacattgagctctctgctctgtcagccagcgctaagggggcaaaagattagatatcgattagaaaacatcattactatatatatatattacttaatattttatatttatatataatatatataatattcttaatatatataatatataaatatataatattcataatatataatatataatatattattatataacatatcatatatatataatgtataatgtataataatgtataatatattatacattatatatataatatatataatgtataatatattatacattatatatataatatatatataatgtataataatgtataatatattatataatatttatatatataaaatactacaaatctaatgggtttaactctctagtgcttagttttagagatacttataaaagtaacaggcaatctactgtttccctcactgtcatcctcatagggataaacttttgaagggacaaaactcaacacaaaatagctgttaaaaggctactctcacacaggaaaagcaatgatttcaggactaactgattctcacagggaacgtctatataatcttattattgtcttataataatggcactgtctcctttgcactcaaaaataaaccacagtgatgatttatttctatctagtttactactaaatttattttttgaaaagctaattcgaaaaaaaaaaggaagctaattctgagttacatacattatagacatgtaaattaaaccgaaaaaaatgaataagcaatacagcacaacttttaagtcttaaaacagtttcacagggctgggcacggtgtctcacgcctgtaatcccagcaatttgggaggccaaggtgggcagatcacctgaggtcagctgatggagaccagcctggccaacatggtgaaaccccgtctctactaaaaacacaaaaattagccaggcatggtgatggtggcaggcgcccataatcccagctactcgggaggctgaggcaggagaattgcttgaaccaaggaggcagaggttgcagtgagccgagatcctgccactgcactctagcctgggcaacagagcaagactctgtctcaaaaaaaaaaaaacaaaaaaaacggtttcatagttcagtaattgaagcttctagatatcttggtttcctcataattataaaaaggttttagaagagaataatgtctctactaaaccaaaaattatattaataatttattaggaaactgagagcaatgttataccacatataaaggagatgttaagattttctgactagttttcaggaaacaacaggtttataataaaaaaaactttatgttttaattgtctgataaataggttcagaggtaaataactatgatcctacaccaacgtactcccaatatctgttatttgtttatctctttctactttttaaaatgaacatgagctttaacttgatgccaaataattaacttagaaataaaattcccaaggaaaccttaaaggacagtaaaagacttaaaatgatagcaagcaaggtacttcagagcaaagaaaataaagctgaaagaaaaagcatacagagcacgcctgtaatcccagcactttgggaggctgaggcgggtggatcacgaggtcaggagttcgagaccagcctggccaacatagtgaaatcccgtctctactaaaaatacaaattgagccaggtgtggtggcatgagcatgtagtcccagctactcaggaggctgaggcaggagaactgcttgaacccaggaggtggaggctgcagggagccgagacagcgccacggcactacagcctgtgtaacagagcatgattctgtctcaaaaaataaaataaaaataaaataaaaagcctatggaaaaggattcctccattcttaataaccttgaacattattattaccttggtccctaggcaaaaacgaaatttgggtcaggtttcttcccctgaaacaatggcatgaccatgccactcttctgttaaagtcacagctcctctccagaactggtctcatgaactcctctccagaactggccctataacccagcaaggtaatgtctttacatgtttcctctctctgcctaagatattcttcaaaacctttcttcatctgggttactcctactcattgtttagatttcagttcataagttgctttctccaaaaagctttccctgacactctgcagactattttagatacaattgccatgctctaccacagcaacctacacttcccccttcagatactttattacgacgacttatttgttggtctcctttgccctgctagactataaaacttataaagactgggactatgatagggagtaaccagatcgtattttaaatgtctccctccctcccagtcaaaacaggcttactgctgcactatataacactgtcgatatatctgtgcatttgcttatatggtccctccctccatatcccgtctcatagaaatgtcactggatcatgtccataaaatttcctgcctttcccaggctatagtgagttttacattctctgaatatttgtggtatttttatcttgtattccacaatctaatttatttatttattttttgagacagagtctcactccctcccccaggcttgagtgcagtggtgcaatctcaactcactgcaacctctgcctcccgggttcaagcaattctcatgcctcagcctctcaagcagctgggattacaggcatgcgacgccacacccagatggttttcgtatttttattagagatggggttttcccacgttggccaggctagtctccaactctgacctcaagtgatctgcccgcctgggcctcccaaagtgctgggattacaggcatacaggcatgaaattgctcagcctccacaatctaatttaattacaaaataaatatgacaatgttaatactttgagaaaagcaatgtttctctcaaaccaaaaccaaagaaccagtggtacaatattaatgcataatattaaacaaatatctttagagcattccccctcattcaattaaaaaatcataaacataaaataaaattaaaattaaaaattattttctctccttcattaaactggaagaatcacaagctttagaaagtattcagatctgtgtctgattcccagctctggcacttatggaccacatgacattggacaagtgactgagctcgtctcctcatatgcaacaagagaatcaacatatctaccctgcaaaaccgctctaagggttagagagaagctgttagcaatatatactaagtatctaagataatcttaaaaaaaaaacaaactggctgctaacatttatagttcaattactactggatgtgaggaaaaaggaagattaaggtgagctaggtttttggataaaaaactgggttcctgactggaaaagaaacagatttggcatggtgaaaaacaaaaacaaaaacaaaaacaaaacaaaaaaaaacctcttatagagacgatatatttcagatgcatactacaagtccaaatgaaggtagttagatactggaggcagagaaaaggccaggactgaaaagataaagttgggaagtttaagtctagaggtagtgttaaaagtcatggaccagtcgggtgtggtggctcacacctttaatcccagcactttggcaggccaaggtgggaggattgcttaaggccaggagctccagatcagcctgggtcacatagcaagataccatctctacaataaatttaaaaattagccgggcatggtggacacgcctgtagtcccagctactcctcaggaggctgaggtgggaggatcaactgagtccagaggtcagggctgcagtgagccatgatcatgccactgtctctagcctggatgacagagcaagactcggtctcttaaaaaaaaaaaatccatagaccatgaagttactaggaagatggtatagctattatggcaaagataccaaagataacgtttcaagaaaaacagatgaagtaatttatgctgaatgctccgagaaggaaagataaggccaacaaaaggttcattggatttagcaaaactgagtctacactttgcaggagctatgtgagtagtgtggagggagctaaagccaagttagaatgggttgaagggtaagtagatggcaaggttgcagggaaatggagtggaaaacactcttttaaatacttttagctataagagaaaacaggcagtaaataggaaatttgttaacaaaggacttttattcccaaacagctcaaaattgcaaggaaactaggaggccgatcatagaggatcttagatgccttgtgaaagcatacaaaatttcttacatcccctaatgtactgtttgaggcaaactatatatacatacaaaaacatgctaaatactttctggggttgtttttgtttttgagacaagtctcactctgtcactcaggcaggagagcagtggcccaaacacagctcactgcagcctcaacctcttcatctcaagaggtcctcccacctgaccctctgaagtagctgaggctacaggtgtgcccaccacatccagctaattttttaattttttttgcagagatgggatcttgccatgttgctcagcctggtcttgaagtcctgggctcaaacaatcctccatctttgggcctcccaacgtgctgggactacaggcatgagccactgtgcccagactaaaatagtttcttacaaacatctataccactaaactataacaaaagtccacttcttatggtatgtctaccaaagaaagggaaaagctgtccttttgttcatttccaaaaacctgtaagaatgagtaattatcataaagattgtatatattaattatctagcatacagaactaaataagccagatggtaaataaaattactgttagtgtaacaggagaccaaaaaaagagagtttaaaaaaaaaacatcagccgggcacagtggctcacgcctgtaatctcaatactttgggaggccgaggtgggtggatcacctggagtcaggagttcgagaccagcctggccaacatggtgaaaccccgcctctactaaaaatataaaaattagccaggcatggtggtgggtgcctgtaatcccagctactcgggaggctgaggcaggagaatcgcttgaacccaggaggcagaggttgcaatgagccaagatcgtgccactgcactacagcctgggtgacagtgagactctgtctcaaaaaaaaaaaaacaaaaaaaaaaaaaccaactttgtaacagaaaacaaggtctttaagaaacattaattacagcaattattaaaaatcttagatcatgggctcatgattgattaaatactatttccaatgcctaatcctgcatttgaaattaattaaaaatataagtatttattaaattccttccatttcttcagaatataatcagagatatcattattgacatgtactgtgcatcctcattcataatgctatatgaaaaattttaatgtatatgtggtctgggagtttaagatatttactagagaaattgtgctagggaaatcctcaacaaaatcccaataaaactaattcaacagactatttaaaaaattatacactgtggccaagtgggatttattcctagaatagaaagatgattcaactacaaaaatcattcaatgtaataaaccacttcatggaaaacccccactatgatcatctcaattgatgcagaaaaggcatctgacaaaatccaatatcctttcatgataaaaatactcaatagaaatagaagggaacttcctcaacttgataaaggccatatataaaaactcataaaaatcatagtcaacgattcaaaggctaaaaactcttccccttaagatcaggaaaaattccccttaagatcaggaaaaagacaaggatgccagcttttaccatttctatttgacataatacaggtactaaaaattccagccagagtacttaggcaagataaagaaataaaaagtatcctaattaaaaaagaagtgaaattatctttttgcagatgacatgatcttatctgtaaaaatccctaaagagtccacaaaatattgttaaagctaataaacacaacagttacaggagacaaacacacaaaaaacactggcatttctataagcttgcaatgaacaatctaaaaacgaaattaagaaaataacacatttgcaacagcatcaaaaggaataaaatgcttagggaaaaaaaaaaccaagaatttgaaagacatacatggaggctgagtgtggtggctcacacctataatcccagcattgggaggccaagacaagagggtctcttgaacccaggaagttgaggctgcagtgagccatgatcgcatcactgcactccagcctgggtgacagtgagatcctgtctcaaaacaataaaaaacaaaaagaaagacttatacgtgcaaaactacaatacactgctcaaagaagttaaagaagtcctaaataaatggaaagacacccatgttcaaggatcataagatttaatattgttaagacagcaatattactcaaaggcatgtacagaatcaatgtaatccctactaaaactccaatggtactttttatattggtagaaaactgcatttaaaattcacatggaatctcaagggatgccaaatagtcaaaactatcttgaaaaagttggaggactcacacttcctaatttcaaaacttactacaaagctacagtaatcaaaacagtgtggtactaccataagaacagaaatagagactaatagaacagaatagagaggtagaaataaacaaaaatattttatgattccatttatatgatgtacttagaatagtcaatgtaaagacagaaggtagaatagtggttaacaggggctagggggaagagaataatgagaatttattgtttatcaagtacagagtttcagtttgggatgatgaaaaagtactaaaggtggatagtggtgatggctgcacaacaatgtgaatgtacttaatgccgctaaacagtacacttaaaaatacagttaaaattgcaaatttggctgggccaagtggctcacatctgtaatcctagcacttgggaggccaaggcaggcagatcacttgagcccaggagtttgaggccagctttggcaacaaagtaaaaccctgtctctacaaaaaataaaaaaattagccaggcacgatggcacacacttgtggtcccagctactcaagagtgtgaagcaggccaactgcttgagcccaagagattgaggctgcagtgagccatgattgtgtcactgtgctccaacgtgggcaacagagtgagacactgtctcatttaaaaaaaaaaaaaaaaaaaggctaattttacattaggtatattttaccacaattaaaaaaaaattaacagaataccatatgacccagcaatttcacttctagatatatattcaaaagaaatgaaagcaggaactcaaacagataattgttaacaacagaactattaacaatatccaatatccaaaaagtgaaaacaacccaagtgtccatcaagagataaaaatggataaataggctaggcgcggtggctcaacgcctgtaatcccagcactttgggaggccaaggagggtggatcaccaggtcaagagatcgacaccatcctggccaacatggtgaaaccccatctctactaaaaatacaaaaattagctgggtgtactggcgcacacctgtagtcccagctactcgggaggctgaggcagcagactcgcttgaacctcggaggtggagggtgtggtgagccgagatcgcacgattgcactccagcctggcgacagagcgaggctctgtctcaaaaaacaaaaaaacttaagaaaaaggataaacaaaaagtggtatatagccatgtgtcacataaagatgtttcggtaaatgatggaccgcatatactacagtagtctcgtaagattagaatggagctgccctacataggtgtaccattttttatcttttatactgtatttttaatataccttttctatgtttacttatgtttattttcttttttctttttttttaatgggtacagactttctgtttggggtgatgaaagattttggaaatagtgatatggttgtataacattatgaatgtaattaaagacaccgaactgtacccttaaatatgggtaaaatggaaaattttgttatatttattttagcacaaaatggggggcactgaacagaccccttaccaaagacaacatatggatggtaaataactcctggaaaagatgctaacatcattactcaacagagaaacgctaactaaaacaaggagatacctgtaagaatggctacacgtccctgagaatggctaaaattcacaaaaccgaacacaccaactgttagcattaatgtggaggaattggaactctcataaacttctggtgagaatgtaaaattataaaactatttccttttttttctttttgagacagagtttcgctcttgttgcccaggctggagtgcaatggtgcgatctcggctcaccacaacctccgccttctggattcaagtgattctcctgcctcaggctcccaaggagctgggattacagacatgtaccaccaggcctggctaattttgtatttttggtagagacagagttctccatgttggtcaagctggtctcgaactcccgaattcaggtgatccatccacttcggcctcccaatcctttttttaatttaaccttcatccctctcctcctctccctcttttgaagtccccagtgtctagcatttccccctttatgtccatgtatgctcattgtttagctcccagatacaagtattttagaaaatagcttggcaattttcaaaatgttaaacacacatctaccacataatctctatccgttccattactaattatttacccaagagaaaagaaagcttcttgtacacgaatgttcgcagcaattttcactgtaatagcaaaaactgtaaacatgccatatgcccatcaacaggtgaatgcataaacaaattgtggtaaatacatacaatggaatactacttagcaataaaaaggaatactactgatacatacagtatttttgctgagtgaaaaaaagccagatccgtaagagtacatattgtatgattttcatttgtataaaattccaaaacatgcaaacttatcttttttctctttttccatcccccttatctctgaagcaaacttatctatcgtgacagaaagcagatcaatggttgcctggggacaaggcaagtagagggaggaattaccaagaggcacaaggaaacttttggggatgacagatatattcactaacttggatgcaatgattgtctcacaagaatacatatatgtcaaaactgtacacttggccaggctcagtgactcacatctgtaatcctagcactttgggaggctgaggtgggtggatcacctgaggtcaggagtttgagaccaacctgaccaacatggtgaaaccctgtttctactaaaaatacaaaattagtcaagcgtggtgatgcatgcctataatcccagctacttgggaggctgaggcaggagaatcactcgaacccaggagatggaggttgcagtgagcggagatcgcgtcattgcactccaggctgggcaacaagagcaaaacgccgtctcaaaaaaaaaaaaaaaagaacaaaacaaacaaaaaaactgtacactttaaatatgtgtagtttactgcatgtcagttatacctaataaaaaatgactggcttgaaaacaagtaggcaagcaatcaatatttgctgaatgaatgaacaaatgattagtgcattcaggaaccaagacagccctagaaagaaaggtcagaaccagatctggatggtctgaacacaaggctaacattcttggattttatcctttacataatacatttctgaggcttctggggaaaagaaagagatatcagtgaaaaatattaatatagtagcaggacagaaaatggactggagataagaaaagactcaaacctgagagatcagacagaaagtaattaaataatctaagcatgaggtaaccaatgttcatacttctctattagcatggtaatgataaaaacagaagggtaagacaaatataagtgaaacagggagataataactaattgcacttaaaaatcattggtataggccagaggcagcggctcatgcctgtaatcccagcactttgggaggccaaggagggaagatcagttgaggtcaggagtttgagaccagcctgggcaacatagtgaaaccccatctctacaaaaaaaaaaaaaaaaaaaaaaatatatatatatatatatacacacacacacacacacacacacacatatatacatatacatgtttatatatatacatatatacacacacatatatacatatatatatacaaaaatagccgggcatcatggagtgcgctgatactcccagcaacttgagaggctgaggcaggaaaatctcttgaacctgggaggcggaggtcgtagtgacccaagatcacgccactgcactttagcctgggcaacagagcaagaatccatctcaaaaaaaaataaaaaataaaaaataaaaaaatcattggtataaagtttccagtttgagtgactagcagaacagaacaaaaagaatgaacttagaatcggtttgagaaaataatatgaataatctgatcttgaacaaagttcaagatgctagaaggacaagacatccaaaagtcagtgctgaaggaatagatttaggagccatacacacagagatgatagctaaagctgctaaagtaaatcaaatttcccaaagtaggtgaatactcccagaaacctcagagtagagaacgacagcaacaagatcttaggaaattaagaaataaatgcatttaaggggcaggaggaagaagatgtaacaatgaaaaaatacagaatcaatgaggcataaggtaacaaccagagaccataagcacatgggaccttcatcaaaagaaatgcgcccagatccagattctaccacttaattaactataacggagtccaattacttaatttatctagcatcagtttcactgtttattaaaacatgggtaagtgttaatgtgtattagttgctattttaacaataaaataacaccttacaaacaagtagatatagtatttcataatttctgaattactccttaggttatctcatttaatgccataaccaccctgtaaagcaaatcatatctgaattctacagctgaagaaagaaggccaagaaagagtgaatctcttagttttagaagtatgagaactaacatcatatttaactgggtcttctgcgcatggtacagtgacaaagaacaggctatagagttcttgaacttaatgggttcaaatccagtaccatcaattgtgagctgtgtgactagaaaaaaattatttaagtgttacggataatactcttgacaaaggcatatgtatcttccttaggcaagaataaggaaacagaaattttttttttttttgagacgaagtctcgctctgtcgccaggctggagtgcagtggcaccatctctgctcactgcaacctctgcctcccgggttcaagtgattctcctgtctcagcctctcgagtagctgggactacaggagcatgccaccatgcctggctaatttttgtatttttagcagagacagggtttcaccatattggtcaggatggtctcgaactcctgacctcaggtgatccacacacctcagcctcccaaaatgccgggattacaggcgtgagctacctactgcgcccagctgaaacagaaagtttgaggtgaagagcatgtgacctctttgattttctcaggaaaataaataattgaaggggaatgtgaacaaggcagttttcaactatgctctgtagatgtgctattggactctcgcatacacaaccaaaatcttggacttcctcattttgttattttgttttttgtttttttgagacagagtctcgctctgtcacccaggctggagtgcactggcatgatctcggctcactgcaacctccgcctcctgggttcaagcgattctcctgcctcagcctcctgagtagctgggattacaggcacacaccaccatgcccagctaatttttgtatttttagtag[143 bp omitted]acggagtctcactctgtcgccaggctggagtgcagtggcgctctctcggctcactgcaacctctgccctcccgggttcaaacaattctcctgcctcagcctcccaagtagctgggacacaggtacatgccaccatgcccagctaatttttgtatttttagtagagacagggtttcaccatgttggccaggatggtctcgatctcttgacctcgtgatccacctacctcggcctcccaaagcaccaacactcaagttttaaagccactagattatattcatctctagagtgtcttgtaattgtaagattaaacactttttctctatcttactcaccaaacacatataaaccagtcctcttctgagccccacagcacttctttagtgcctccttatgataccgcacattcttcaaaataaacattctaaactccattccctcaattagatttaagctccttcaaggcaggcaatttgtcatttatcttagtattcctcaaccccaagcacagtgcaagcaagcactttagggcaaaaaatgtaaaataaaaagataagggaaatggttaatccttacaatatatactatatatactaactgcatgtaaaaagaaatacaacttaccctaatacagctgaaacaacacagtttggagcaatgaggacacaggcgtgcatcccgcaatttctccatacaaatgaaacatcggaaaacctcagcaatgctctgaaaacagtaaaagatgtaaggtccaccagtttaggctactgaatcaagagtaaaaggcaagctcaaaacaacttgacatttacatttattttgggctgatctctcaattttaactattccatatcaggatttggttggtcaagatacagagtacctcaaaacatctggaaaatgtactcccgtttggtttcacgatgattctattctaaggaaaatataggaaatgcaaacacagacatgcagaaaaattttcactaaagcagtaattataatggcaagaatctaggtacagcccaaatgtccaaatattaagtaaattatggcagttacacatagattacagtcaccagaaatacttcttcatctaatgatatagaaaaatgcatataatgtataacagcagggaaaaaaggcccaggcatgatggttcattactgtaatcctagcactttgggaggctgaggcaggtggatcactcgaggtcgggagttcgagaccaacctggccaaaatggttaaaccccgtctctactaaaaatacaaaaattagccaggcgtggtggtgtgcacctgtaatcccagctacacaggaggctaaggcagaagaattgcttgaacctaggaggcggaggttgcagtgagccaagagggtgccactgcactctagcctgggtgacagagtgagattctgtctcaaaaaaaaaaaaaaagaaaaaaggaaaaaaggcagactatatgactgaatacacaacatgaacttttaactttttctgcaatttccccaaaaggtataaactgattttataatttagaggaaaaagaagtttaaaaagacacatcctaaaggcagtgtactgtgacccagaaaaaaatgaattcagaatccagaaatctgaattgctgccctgatgttacaacagactagctacttatttgaacctgagattctgccccaattgaaaatgttgacggtagttcaaagcgatcttgggaacaacaacaacaaaaatatgtaaatacaagaaacagtattatgtttgcaagcctcaatttaatcaatttaggaagtaactgaaaagtttttaacaagaaaaaggatacaattaaacgtatacttattgtattgtatactttgtttttatattactgacatttactttcactccattctagaattaaaccctcctaaaaccaagataagtttacaaaacctttataatactttatatgaggaattaaggagaaaattactcattaatctcatcatgactctgtagggccagaaagaacctgggagatgcagattctgtaacctgcaacggggtggacaataagactactgaatgactagtttcaagtggaatatccataacatagttaccccttactaaaaagcaaggatttcctatttcagtatctgaaaggttcaaaatttgataatgattacacaattatgttcaataaacaatcttttaaaatatattcctagcctttacttacatatcctacatatcccaactattttaactcacagcttacaagaatcagttataaaaagaagagtttgttctggaaactacacatgagataatatatgctgattcaatctaggaaggaagggcagaagcctgcaaaatgtgccactgagagggaaagatgactatccatttggaaggagatttagatcagctcaagaactcgcaaggactggtggcgagtggcagggtacatccatctgatgaatctgcagttttggtcggaaaaggatgctgtttgcaaacacccggtggggatgagtacctgtgccaagacatccttgaaaactccaggatacgcaccacctgactgcggaacagtgagcacaagacacccggagcgctgcagaatgggcacggcatccttggtaccgggccagccctctccacagcggcaggggcggggtaggggtgccctactggagggaggacatgggcacgactccccgaataaaaaccgctcatcgggtgggggcggggactaaccaccaccctcacaaccccctcacctccacgctctgttcatccattgcctccggctctcggcggggccgctggcgacccgcaggctccgcagtctgacctcttaggcgccggcccgaggtcgccagatcaaatcgccgataaaagcccggcgcccacgtcagggggctctgacaaccgccccacctgcgcgccccatctcttcaggtccagcgccgcctacccccatttcgccatttttaccggcgcgcccgccccgaggcgcagaagtagggcgaacggtggccgcagctcctttctcccggctcagccgccggccagcagccgcgccggaacctcggcccacgtgacgcgggcgcgcgcctatggaactgacggtggagttcagcgaagaaggtgccgcagagaattcgcaaacaccaaccgtaaccagagcagctgggggcgcggcggcgagagaagctgcgaagcgcatgcgcgcaggacgctgtgggaggggaaaggaggggaggagcgtggagcgatcgcctagttcccgcgttgcggggcgcatacgagacttggcgactcgctgcctcagggttgcgtgcctccggccctagcctgcgcaggcggcctgagcttggggctctgctacgccacccacgcccaccttggcggagggcggggccccacggctctcaaacttgcgcgccaaagacggagccacctggcgtactggtggaaagcgcagacttcagagccacacccgtagttaagtattcggactctgagattccagggtggggcccaggccatccgcgttttcacccagcatcgtgtgattcggcagcaggtggtctgtggcccgcactttgagaaaccctggtgcagaaggttcatggttagtggttctctctggaaggaacagtctaaggtttgtaggacttgcgttccacctaccaaagctaatcgagttagaaggctccaaactgaggtgtcatttctcattacggtggtgagaggacgggaccacacactgtgaagtcttcgttcccacatcccacacttcattcttgccgcctaagttgtcgccgtgggactattgaaagggtatcagcgatattcatctttcctataaatgggatctgctttctacagtttcctgccagatgtgtaaagattgcaagaattgaaggtttgtgagacaaagagggcatatcaaattcgtaatttgaatttaatttttcctgtatttattgcaaacaactaattatacttaaccgacctagagtgcacatgtagagaatcactaataatctagaaataagttcttgaatatcaggcatttaggcttataggtggtgggtagcaacaattttttttaactacttgggtcatgaacaagatataatttagaaagattaatctgagactgaaaaattctttcagtaagaattatttgtggtctttgacctacatggagctatttttacgaaaatggcctcagttgtacatttttaaatggttgatggttaatattatgagaattttactt[132 bp omitted]gaaaccccgtctctactaaaaatacaaaattagccgggcgtggtggcgcatgcctgtaatcccagctactggggaggctgaggcagaagaatcgctcgaacccaggaggcggaggttgcggtgagccgagatcgcgccattgcactccaacctgggcaacaagagtgaaactccgtctcaaaaaaaaaaaaaaaaaaaatgcaatgctgtacttgggattcagagtaatgagaagtggcccttgctctcaaggagcagtacagaagacaaataagacaaattgcaatacttacatgataaatagttaagattcttgtatgtttgccgaagaacctaagaatgtcgaaggacttattgcaccaattcataatagcgaacaattagaaacctgtacagctgattagaggccgttggttgcaagcaaaaaggataacttgagcaaaataaataatttagttggcaagatgctaaactcacatcgtttgccaagccctggggtttgagagccaacggtctgctccatcagaatcccttaaaggctgaccttgctgccctccccacaagaaaaatctcctaacttcatacatatccttaaataacttgctgttatacaacttacttgttatattatttgtataacttgctgttatagagcttaaatgtctatcactaaggaactgataaaaatgactatatatctagctgggcatggtggtgcacacctgtggtcccagctactctggaggctgagatggaaggatcacttgagcccaggaatttgaggctgcagtgatccaagatcacaccactgcactccagcctgggcaacacagccagatcctgtctaaaattaaaaaaaaaaaaaaagtatggtatagccatataatggattacagctgttaaaaagaagggtggatgtgtgacataacaaaaatatattagaattgaagaccgggcacagtggctcatgtatcccaggactttgggaagctgaggctggcagatctcttgagcccaggagttggagaccagcctgggcaacataatgaaaccaagtcctacaaaatatacaaaaattagcaggggttggtggcatgcatctgtggtcccagctacttgggaggctgaggcaagaggattgcttgagccctggaggctgcagtgagccatgatagcaacactgcattctaccctgggtgacagagcgagaccctctctcaaataaaataatgaaatgaaaaaaaatctaagtacagcagcagtacaaggcatagtatcaacctacttttgttgaaaaaaattttttttagtttgtatacatgtagaaatgcctgaagcaattatttgcagattacctctagataatttatatgcctgttttgttgttgttttttttttgtttttttgggtttttgttttttttttttttgagacagagtctcactctgtcgccaggccggagtgcagtggcgcaatctcagctcactgcaacctccgcctcctgggttcaagcgattcccctgcctcagcctcccgagtagctgggactacaggcacgtgccaccacacccagctaatttttgtaattttagtagagacagggtttcaccat[136 bp omitted]aacttaagacataaagacactatagtcacataggagaaaacaattataatccaaatgagaaacaaaagatctaaattaaggaggtgtgaagataatgtagaggttgtatactatgaccattttagaaagaggattgtaggttttattgactaagaagataaagggatgcaaattagttatacaggttttaattccagacaacagaatagtggctattaacaataaaatcagtaagtattctggacatgtttaacttgaatattcaggtaggggattttattggaaatacggatctagagctagtggaagaagttatatttaggagtcatccacaaagaggcttgagaaacaaatgaaaatgtattgagaagtgcatagagaacaatgttaagggggctgtggggaaaaaacaacatttggaagataactgaaggaaatcatagaggaaaaatagtacaatctaatttttctccctaactgaaagcaaaaccacttttaatactaagaatttattatgatctctccatgatactaccgttttttcaatcccaacaatcatcatcacatcccagagccatctcatgacaagagctttctaaatactaattgcctgaacactgaagaaaattaatatctgatactaaggtgt[132 bp omitted]gccccatctctactaaaaatacaaaaaaatagccgggcgtggtggcgggcgcctgtaatcccagctactcgggagggtggggcagagaactgcttgaacctgggaggtggaggttgcagtgagctgagagcgtaccactgcattccagcctgggcaacagagtgagactccgtctcaaaaaaaaaaaaaaaaaaaaaaaggctttctgttcttgaaatattcaaactagacaggacaattttaactgaagctgttctcacaaccctgtttttcagctattataagtttgttaatggacaaacatgttcataactgaaattttaaaattacataaaagtataattctataacctgcagaactaacatttgatgcatttttcctagtcctttcaatgcttagtttttattacatgtatgtaatatcacttattgaaggcttactaaatactgaaccctgtattaaaacactttcctgtcttgtccttccaaacatcctgacactcaaaagttaagtgatctgcacagggtcatagctagaatttaaaagctgctacttacatctcagatatgactccaaagcccaatcttcactacaaaactgcaatacctgctttccctctcccccacttagcatagtttcagcatttcccagaacattaacagtaataatttattggcaacttgacctcttattgtatacatacagcatgatttattttcctattcacctagtactagccaaatgtgtatgtatattgctattataaacaaccctgtgattaacatctttctatcaagatctgcctctactttgaacagtttccttattgccaatagttattttaaaataaatagttattttaaagggaaattgacacatacatataacacactcacgcaaaactggcaagtagcagataagtgctcttctaatttcagtttcctagctttcatgtagaatgaacaattatagtaataaaggctgaaggaaaacaaagatattattgagatacaacagggacagtctaaaacagcatcagaaagcaagttcatgctgttcaacattagcaggcaagggaaatagggaaagaaatacgcaaacgtggctatcacagaaaagccagcttattactttaggttctgtgggagactacaggtcacataaaagcagtctcaacaataatgtgaccacatgtgcaatcaacatttacaaaatgaaattatatatcatgtataacacaaatgttttgcctatactttaatttacaaagccacataccgaatgactgaaatgtacataaacattcttttatgatagaccagaacatctatattatcatgacttagaaaaagaaaacagatgcaaaatagtgttgagaatttctggcctgaaattacaagactaagtgtgtgtgtgcatgcgtgtgtacatatatttaaatcgttttattctcatttgatccttttggctgaactttattcatatattatctgcccttcttcttataatctctctcatgaaagatatcattatccagtcattgaagccaaacccccttcaccagcccccaatctctagacatcaagggttaacaagacatcttcctaaatttctccggaattaagctcttctctgttagaatttcctttccaagtccatttcttcataaatctggcatgtgaaatttgaattgctctgccgcagttttctcttctttagtcagtggtgacagctagaaaataaatgataaaatctttatttcaaaaactttcaaagacttaaatcagtttagttaacttctgcattgtcacaccaataaatgtttccctaagcttatactatgtatgtaatcacagatttagaaaggcaagggaaaaaacagatacttggctatttatatacaaggtcctatgatgtttgagcttctaaagaacttgcaattaagttgaagaaacaagaccaagaaatcaaacaatttaaggattatagcagaaccaaagaagtcatgtttggatgccatattctaaaagtacagtcaaccctcagtatctgtgggagattgattccaggataacaaaatccacagatgctcaagtcccttatataaaactgcgtagtatttgcatagaaactatacatatcctcctgtatactttaaatcatctctagattacttatatacctaatacaatgtaaatgctatgtacataattgttacactgtattgtggaaggaataaatgataaggaaaaaagtctacagatgttcagtacagatacaaccatctaatttttttccaaaatttttgttttctatttttgaaacggggtcactctgtcgcccaggctggagtgcagtggcacaatcatggctccctgcagcctcaacctcccatctcaagcaatcctcccacctcagcctcccgagtagctaatttttaactaattagtacactaatttttagctgggcatggtggcgcacacctgtggtcccagctgctcgggaggctgtggtgggaggatcacttgagcctgggaggtcgagactgcagtcagccctgatggtgctactgcactctagcctgggcagcagagcaagacctcatcttaagaaaagaaaaaagaggccggacgcggtggctcatgccttctaatcccagcgcttcgggaggctgaggcgggtggatcacttgaggtcaggagtttgagaccagcctgaccaacatggtgaaaccccatctctactaaaaaacacaaaaattagccaggcatggtggtatgcacctgtaatcccagctactcaggaggctgagttgggagaatccctcgaacctgggaggcggaggctgcagtgacccaagatcgcaccactgaactccatccagcctgggtgacagagcaagactaaatcacacaaaaaaagaaagaggccgggcacagtggctcatgcctgtaatcccagcactttaggaggctgaggtgggtggatcacctgaggtcaggagtttgagaccagcctgaccaacatggtggaacctcatctctactaaaaatacaaaaaaattagctgggcatggtggcaggcacctgtaatcctagctactcgggaggttgaggcaggagaattgcttgaacccgggaggtggaggttacagtgagccaagattacgccattgcactccagcctgggcgacaagagtgaaactctgtctcaaaaaaaaaaaaaagataaaggaaaatgtattatcattccacaataacttcagaaaaaggaaagacttctgggctgacttatttagcaactgaacaatgtaaggactccattttttccatctcacagctctaatatcctggatagtgcctttaccctcaagctgacagcaaatggctttaacggtgctaggtatcacaactctacacaatgtccagaagaagaaaagaagctttctcttctcagggttctctcagcagtgagtaaagtcttcctagtaacctacttccagactatccttactcacatgtcatttgggttacaaacccattcctcaaccactgttagttaaaaaataaagtccattccctatgccaatcagatgcacccctggagctgaggatggggccagattcatctcaggcacatcgctatgagggacaacacacatctcaagaaagtcagtatagtcatgtgtcacttaatgacaggaatacgttctgagaaatgcatcgttaggcagtttcatcgtgtgaacatcacagactgtacttacacaaacagggattgtatatatacactcaggctatatggtatagcctactgctcctgggctacaaatctgtacagcatgttactgtactgaataccgtaggcagtggtaacacatggtatttttatatctaaacatctgaacataagagtacagtaaaaatacgctattataatcttctgggaccactgtcatatatatttggtccattgttgaccaaaacgtcattatgcactgcatgtctatattctggtaggcaggaaaggataacagatactgagaaagaaaaatggccaatagcatccaccaaaagcaggtagcagcaaaagaagggaggctgaagggaagttgtaagggactttcacagagcaccaacaaacaggctggctgaaacaaagggttatgtggggaattaataggaggtacaacctgaagaatcaagtagttacaattctgccaactatataggtcatctctagagagactgccaaatctggaacaccccagacctacagaatcagaatctctagggcagcactgtccaataaaactttccatgatgctggaaatattctttatcagcactgtccaatcagtaggtgaagaagttaatgttcatctttcatttaactaccttaaatgtaaatttcttttcttctttttttcgttctttcttcctttttttttttttttttaattttgaaatggagttacactcttgttgcccaggctggagcgcaatctcagctcactgcaacctccgcctcccaggttcaggagattctcctgcctcagcctcccgagtagctgggattacaggtgcccgccaccatgcctggctaattttttgtatttctttagtagagacgggggtttcac[141 bp omitted]ggacagcccaaatctagaacagccacagaacctatatgattctgatatgcagctggttccactgatcaacatttgcccaacatgttcacaaggataaactgaaaaacaatcatacgtcttactacaacccagttacaggatttccttcttctacctcaaaaaaaggaaatgttattctgacaagactttgctttttcgttttgtttttgttttagagacagagtctcgttccatcgcccaggctggagcgcagtggtgcggtcatagctcactgcaacctctaactcctgggctcgagcaatcgtcccacctcagcctcccaagtagctgcgactacaggtgcacactgccatacccagctatgagactaatgaatccacattgccccttgtgatcactacaaaagctttcagaccatctgtttaataaattctcaaagaatttttccaggaattaaagtcaagttaaccagtctaaagtttgtagaaatttttcttctttatcacacatattttggaagatcatagaataccacatattctacttttaatgcctttttaattttctatttattattatatatgttttgggcgtttgttttgctattttttgtttgggtgtaagtttagtcccttttttcttttgatgagatcacctttataattgaacatatttaaacctcagtttaaatatgagggcacggaggctcacacctataatcccagcactttgagaggccaagacaggtggatcacttgcagtcaggagttcgagaccagcctggccaacttggtgaaaccccatctctactaaaaatacaaaaaaattagctgggcgtggtggcgcatgcctgtagtcccagctacttgggaggctgaggcaggagaattgcttgaatccaggaggcggaagttgctgtgagccaagattgtgccactgcaccccagcctcggcgacagagggagactccgtctcaaaaaacaaacaaacaaaaaaattaaataaataaataaacttcagtgtcttttgtctttttttttcttcttttgtcaatgtcttaacatcccctaagaaagattatgaaattagtatgtattccctttctcctacctccttttctgttctgtatttattatttagtattatcaattcaggtgttctttttaactattacaaattcaaatacattttctacccttccaaatgaaaaaccactctttgataaagattatagcaagataatacctgaacagatatacattctgttatctataaacatagcactattggttccaatgagactttatccttttcttgtccttcttgttccccagataattttaaagcccctttaaaataacctt[145 bp omitted]tcccaggttcaagcgattcccgtctcagcctcccgagtagctggtactacaggcgtgcaacaccatgcccagctaatgttttgttattttagtagagatggggttt[131 bp omitted]tttgtccctgtgaccttttaatatttgaaatttatttacaaattgtaccttgcaagtcctttaaactctgggctcatataactgtttttggttatcagctctacagatgtcattcccattcacatttggatcataaaaatttatcaatataatggtttgtttattaagctacccttttaaacatctctcagaagattaagtttcatatctgtattccctctgaactttctactactatctcatttttattttagtttattttaaaatttttgggggacagtctcaccctgtcacccaggctggaattcagtggtgcaatcatagctcactgcagcctcaaacttctggggtcaaaggatccttctgccccaaatagttggaactaccagcatgcactcccatgcccagtaaatttaaaatatttttttcttcttctttttcttttttttctttttttttttggtagagataggttctcactatgttgtccaggctaatctcaaactcctggcctcaactgatcctcctgccttggcctcccaaagtgccaagattataggcatgagccactgtgcccagcatactacctcatttttaaagcagtaggtacaagactcactatatccaacatttcccaatttggtcatcattgattctaaaatatgaccacctctttcaagttttataacttttaaatcattcttcttgtttgccataacttgatccaaagtaaaagctcccttagttttcagcctttgacataagtattgttcatttcaggtatttcttcaactgaaga[137 bp omitted]catggtgaaaccctgtgtctactaaaaccacaaaaaattagctgggcattgtggcaggcgcttgtaatcccagctattccggaggctgaggcaggagaatcacttgaacccaggaggtggaggttgcagtgagccgagatggtgccattgcactccagcctgggcagcaagagtgaaactccatctcaaaaaagaaaaaaaatcctctattactatataactacttttatgtaccaatttgtagtctcaaaaatataccatcaatttattatatccagtgggggaaatttgtaaatattcaaaataccatttttccctttgccctctcacccaagtttattctgtgcttcaataaatttatggttctatacagatatgttgtcatgtacatctggaactatacttaatcagctatttgttttccaagaacaaggttatgtgctctattgtcaggcacatataatgaagaatgtgtgatttgagatgatttataaaagcttatcatatacatacttttttttgcatttaatttactagcatgtgacacaaccctgttttaaattctgtctccccattacctctattccctgttcaattgcccttccttcctccatcattcatctccttgtgatataacagatacatctaaggtatcattttatcgttctaagcagatattattctattttttcccctccatttgcaatataaagtattcttgatcaaactgacctgggtaattaacctttctgatttactctagctacaagcccataattcaaagtatcttaagccaaaatttagtgtagagttggcaaataaatatcacatatgcagcccttcctccttcccatgctcgtggcagactacgctattttctgccatgtccagacacagctccttgatacagcactctaagccacccttttctagacatctcagtctcactagtacttacaggaaccagctaagctgctagattttataagtattaccaagttttctgccatggttacataattcaagacagcacaattctttattaaccatgtcaagtccaaatgcttatttttaaataaacagaaataagagctattatacttcagggtatcaggaaaatctttcaatagttcaaactgactgctgagtttcaaaatttaagttacatcaggtttatttttcaaagcaacactcagagctaaagctaaacaaatctaacctgtcaactgaaagcattacctccaggtctgtttgcttctgtagtttttgtatcatattcatagtctttttcacagtagcacaaatgcggctcttactctctttctgctcaacagcaactggtttaaagcgggcatacaaagtttgatatcgagactttatcactgacaattcctttaagagtgtaactggatttttctatgtcaggaaaaaagtgaacatgtattaaattatgaaagattaaactttttaagaattaaaatactgtatacatacaacacattctaccatccatttaattgaacactgttgagtatttaattatgcagccacatgacatcagatgggaggtggggaagagagaaaagtataagacctagatcctattctcaaggaatttatagcctaggtacagaaataacccaccaaaaaaattagcaatattaaacagcaaataagggtcaccttagatatataacatttgatggatagttcacaataataaattatacaatatttctaaaatacaattctaaatgctattcagaagaagataaaaggcactattagtatttgttcttaaagaataagaacttgaaactacttataaaaatcttttttttttttttgagatggagtctcactctgttgcccaggctggagtgcagtggcgcaatctcagctcactgcaagcttcacctcccaggttcatgccattctcctgcctcagcctccggagtagctgggactacaggcgcccgccaccacgcccagctaattttttgtatttttagtagagaaggggtttcaccgtgttagcaaggatggtctcaatctcctgaccttgtgatccgcccgcctcaacctcccaaagtgctgggattacaggtgtgagccactgcgcccggccaaaattcgtaaacatactatcatggggataaagtatgtataaatatcaatttacttatatacacacaaaatataaaattcatgccaacccaactgtatttataaactatgctggttttccagatttattttgtaatatacattaccactattccataaaagacatttcaattggaccccttctgccacttggtaattcttttctttaattttttttttaaatagatacaggaatctcactgtgttgcccaggctggtcttaaactcctggcctcaagtgatcctcctgcatcagcctcccaaagtgctagaattacaggtgtgagccactgtatcctgccagatttctttttttatgattaggtaagattcatatattttcaggccccaccaagtgacagcacaattaataaaaagatctataccataactgtaaattttcgcaggatagaaaaaatattctgaaacttccaggtgataggtaagggactggggtaggctgaggaggaaagcacagacaaaggatcaggaatgagaatggcatccatttttcaacagcaacaatagaagctagaaaaccacgaagtaatgatgttaaaattaagagaaaatctccaatctagaa[145 bp omitted]cccgtctctacgaaaaatacaaaaaattagctgggcattgtggcgggcacctgtagtcccagctactcaagaggctgaggcaggagaatcgcttgaacccgggaggcagaggttgctgtgagccgagatcgtgccactgcactccagcctgggcgactgagggagactccgtctcaaaaaaaaaaaaaaaagaaaaagggttaaagggtacaataaagactttttcaaacattcagcatctcaaaaagttaactttctgtgtaatcttcctcaggaagcgtctaaatgatatacttccagatcaaagaaataaaccaccaaagagtgaaacatatgatacaacacaggaataaaacaaagggaagtaccaaaataatggtaaagaaatcccagaaatgccgggcgcagtggctcatgactgtaatctcaacactttgggaagccgagacgggtggatcacctgaggtcaggagttcgagaccagcctggccaacatagcgaaaccccgtctctactaaaaatacaaaaattagccgggcattgtggtgggcgcctgtagtccttgcctcagtaggctgaggcaggagaatcacttgagcctgggaggcagaggtggcagtgagccaagatggcaccattgcattccag[148 bp omitted]acaccgtctctacgaaaatacaaaaaaaaaaaaaaaaaaaaaaaaaaaaattagccaggcgtgtcggcatgcgcctgtagtcccagctactcgggaggctgaggtgggagaattgcttgaacctgggaggcagaggttgtagtgatccaagatcacgccactgcactccagcctaaccacagagtgcgactccatctgaaaaaaaaaaaaaatcccagaaagacagcaattcaagaagcctatagagcaggaggtcagatgggagcaggatagagacaccagaaaggataggatgtttccatgggagaaaataaaacttaaagaacatgtagtgtgtctgacaatattgagaagagttttacagttgttagaaatgtctgaggctgaattagtgaaaagtatatagaaaaactaagcaggctgggccatggtggctcatgcttgtaattctagcactttgggatgccaaggcgggaggatcgcttgaggtcaggagttcagtaccagcctgggcaacatagcgtgaaacctcatctctacaaaaaataattcaaaggctgggtgcagtgactcacgcctgcaagtcccagcactttgggagaccaagaggggcagatcacttgaggtcaggagttccagaacagcatggccaacatggcgaaacctcatctctactaataatacaaaaattagccgggcgtggtagcacacgcctgtagtcccagctactcaggaggctgaggtgggaggatcacttgagcctgggaggcagaggttgcagtgaaccaagatggtaccactgcactccagcctgggcgacagagcaagactccatctcaaaaaataataactattattattttttaaattagccaggtgtgctggcacatgcctatggtgctagctactcgggcggctaagcagggaggatcacttgggcctgggaggcagatactgccgtaagccatggtcacagagtagctgggactacaggtgtgtgccaccacacccagctaatttttgtagttttagtagagatgaggtttcgccatgttggccaggctggtctagaactcctgacctcaggtgatctgcctacctcggcctcccaaagcgctgggattacaggcgtgaaccactgcgcccaacctttaaattattttttgtagagatggggcttccctatgttggccaggctggtctcaaactcctgcactccagcctgggcggcagagcaaaaccttgtctcaaaaaaaaaaaaaaaaaagaaaagaaaagaaaagaaaaactaagcaaatggaaggaaaaaaaagaaaacaattattagctctagaaaaataagttgtgaagaaaggaaagcagacacagtattcaatagggcttatataaaagagttacagaaattgtgaagacaggaataaatatgggtagtaaagtatttaaactttatcttccatagtacaaaattcttttttttttttttttttttttaagagttagaattggctgggtgtgatggctaatgcctgtaatcccagcactttgggaagctgaagcgggtggatcatgaggtcaggagtgtgagaccagcctggccaacacggtgaagccctgaatctactaaaaatacaaaaattagctgggcagggtggcatgtgcctgtaatcccagctactcaggaggctgaggcaggagaatcgcttgaacctgggaggcggaggttgcagtgagccaagatcatgtcactgcactccagcctgggcaacagagcaagactctgtctcaggaaaaaaaaaaaaaaaagttagaatcttactctgtcacctaggctggagtgcagtggtgcaatcatagctcacttgaactactgggctcaagtgatcctcccacctcagcatcccaagtagctgggactacaagtgtgagctactacatcaggcctatagtaggaaattattattaatgataacagctaatgtatagcacttactctggactaaacagttatatatgttaactaattttattttctctcaatctctgaggtacatagtaatattcccattttacagatgaggaaattaaagtacagaaaggttaactgacttggctaaaatcacagtgctaataagaggcagagccaggatgtgaagtataacagttcgtatccaggaaattagtagatgtttcagatcaggaaaaataaagatgcagtacaaggaaaactatttagaaatataaaggaaataccataagacactgagatgagtggtatccttcttgagggtgggagtgtgaagcattattctttgtaattataagctttatatttctgcaactcttcaaatatattcaagaatttgacaaaaataaaagtttaggccggggtggtgactcacatctataatcccaacactttgggaggctgagacaggaggatcacttgagcccaggcaagaccagcctagtaaacatggcaaaaccccatccttactaaaatacaaaaaattagaaccaggtgtggtggcacacacctgtatttccacctacgcaggagactgaggtgggaggatcacctgagcccaggaggtcaaagctgcagtgagccatgatcatgccactgcactccagtctggacaacagagtgagactctgtctggggaaaaaaaaaaaagtttaacattgggagggaaattggtaggagggaagaagtcatcttcctcatgaggtgataataaattatgtaacttaattataaatgatctttaggtaactggaatgtagctcagtagtgaaatacccagagatctgcatgtattaatataactcaggagaatgatgagttccccaaatacagattcatacaggaaaaaataaaagtgacaagaactaatccttgaggatctcacaaaactaggaaaggaaagttggtatataaagcataagaaataaatggccatagagctaaaagagaggacagggtagttgggcagctacccataatacatgtttttatgacattagctcgatcaataagactgacatggcagtgagtaatttaggacaacatgatttgcatttatggcctgtttatgacaggttaggactgtggttaggacttagcaccataccacaaaggaaaaactgttgtgcgcatagcctgttttatttgagtaactggctgttgggaaccactacattcttttttttttttttttgagatggagtttcgctcttgtttcccaggctggagtgcaatggcgggatctcagctcaccgcaactttcgcctcccaggttcaagcaattctcctgcctcagcctctcaagtagctgggattacaggcatgcgccactacgcctggctaattttgtattttttttttttttttttttttagtagagatggggtttctccatgttggtcaggctggtcttgaactcctggccctcaggtgatccacccgccttggcctcccaaagtgctgggattacaggtatgagccaccgcgcccggccaggagcctctacgattcttttattagtgtttgtaaactgtgctgcactttagttaattttgtgcctataatacttcaattcattttagggttttagttatcatgagtggatgataaaaggttacaagaatggctgagcgaggtggctcacgcctgtaatctcagctttgggaggccaagactggtggatcacctgaggtcaggagttcaagaccagcctgaccaacatggtgaaaccccgtctctaataaaaatacaaaaattagccaggatagtagcgggtacctgtaatcccagctactcgggagggtgaggcaggagaatcacttgaacccagtgagccgagatcatgccattgcattccagcctgggcgacagggtgagactccgtctccaaaaaaaaaaaaaaaatgattacaaaaatacataaaaatactctgctaatgatagtgctggtgatgggagaaaagaaaagccaatatatgaacaaaaagctcagttcaattaagtcttttgaaagaaacaaaaggaaatgaattatactactaagcttaaaagaa[185 bp omitted]gtggcgggtgcctgtagtcccagctactcgggaggc[144 bp omitted]attatgtttctggaacaaataaagttgaagaatatagtaatagaaacttatagtttcttgttagctctctgtaaataaacaaatcctagccaaaaatgttgacttttatgcagaattactgactgcctccaaatcacgaggggtactagaatgaggataatgcagctaaaccaaattatatgtatggatgtgggtgtgagtatacaaacacacacatacacacacaccacagtggctggcacatagtaatgttcaataaatatttactactactataaccaccctgccgccagacagaggtattagaggctactgcaactagttgtttactttctttcctgttcctttacatgtatataaatcattaagactgatgttggacaaatctacaaagattaaaatcatggctttattctcaactataacacacgaaaaagggagaaagcagagattttcttgaagttattgaatattacaggagttaaaaagtcatatttcctcaaaaattgaaacacagaattaccatgtgatccagcaattgcacttctgggtataaacccgaaagttgaaagcaggtactcaaacagatacttgcataccagtgttcatagtagcattattcacagtagccaaaaggtgaaagcaaaccaaatgtccattaacagatgaatcgataaacaaaatgtggtacatacattcaatggaatattattccaccttaaaaagaaaggaaactgacactgctacactatatatgaatcttgagaacattataagtgacatacatgagtcacaaaaagacaaatattatatgattctacttatatgagtccctagagtagtcaaattgatagagacagaaagtagaatggtggctgctaggagtggaagaaaggaacgtggagttattgtttaatggatatacagttacaatgtggggagatgaaaaccttctggagattgatgatggtgatattgtacaataatgtgaatgtagttaatgccagtgaactgttcacttaaaaaagattaagatggctatcaggtataaggacacgtgcctgtaatcccagctgctaaggatattgaggccagaggataaacctaggaattggagttcagcctggaccatattaaaatggtaaatgttgttatttacattttactacaatttcttttcttttcttttcttttgagacagtcttgatctgtcgcccaggctggagttcaatggcgcaatctggactcactgcaaccttcacctcctgggttcaagcaattctcctatctcagcctcccaagtagctggggttacaggctcgtgccaccacgcccggctaattttgtatttttagtagagacgggtttcatcatgttagccaggctggtcttaaactcctgacatcagatgatcagcctgcctcagtttcccaaagtgctgggattacaggcatgagccaccacacccagcccacaatttttttttttaaactgagaatgtaaaatgctttagatgccttggaaaacagtttggtagttccttaaaatattaaacctgagttatcatatggccagcaattctactccaaggtatatactcgagagaaatgaaaacacatgtccacacaacaacttgtaaatgtatgttcatagcagccaaaaggtggaaacaacacaaatgaccaccatcaa[131 bp omitted]aaaccctgtctctactgaaaatacaaaaatcagctggtgtggtggcacgcacctgtactcctagctactcaggaggctgaggcaggagaatcgcttgaacccaggaggcggaggttgcagtgagctgagattgcaccactgcactccagcctaggggacagagcaagactccatctcagaaaaaaaaaaagagagagaaaagaagatggagtatagccatacagtggagtattactcagcagtaaaagcaaatgaagtactgattgacgctacaacatggatgaaacttagaaacatcctaagtgggccaggtgcagtggctcatgcctgcaatcccagcactttgggaggccgaggagggtggatcacctgacgtcaggagttcaagaccagcctggccaacatggcaaaaccctgtctctactaaaaaatacaaaaattagccagatgtggtggcacacaccagtagtcccagctactcaggaagttgaggcaggagagttgcttgaactcggaaggcggaggttgcagggagcagagatagtgccacttcactccagcctgggtgacagagcgagactcggtctcaaaaaaaaaaaaaaaagaaacatcctaagtgaaaaagttagacatgaaaggtcatatattatatgattctatttatctgaaatgttcagacaacaaatctgtggagacagaaagtagattcgtctttgggagcttgcaggatagcagggaagggtggtagggagtagctactcatgggtatggggtttctttctgaggtgatgaaaatgttattgtggcaatggctacaaaaccatgaatactaaaagccacttaattatatactttaaaggggtgaatttaatggtatatgaattatagctcaataaagctgcttttttaaaaagttgcaggaaaaaaaatacccacaggtggaacaaagatgagagatggaagtcagaggaaaaatgggagcactacacgtcaatgtctttcaaaacagtacttgaaagatactgactaggtcaggcgtggtggcgcacgcctataatcccagcactttgggaggccaaggcaggtagatcgcttgagtccaggagttcaaaaccaacctaggcaacatgttaaaatcccatctccactaaaaatacaaaaattagctgggtgtggtggtgtgtgcctatagttccaggcacttggcggactgaggtgggaggattgcttgagcccaggaagtcaaggctgaagtgagctgagattttgttaccgcactccagcctgggtgacagagtgagaccctatcttaaacacacatacacacacacacacacacacacacacacacacacacacggtctttaaactgataaaaacagatactacacttgatcttagccaaaaggctgagaagaaatatcacaggaatctttaagacaaaagaaagaaaggaaggaagggaaggcaggggaaggaaagagaaggaatgaaggaatggaagggaagtgaggaaagaaaggaagaaaaggaaggaaagggccaggtgtggtggctcacgactaatcccagcactttaggaggctgaggcgggtggatcacttgaggtcaggagtttgagaccagcctaacatggtgaaaccccatctctactaaaaaatacaaaaattagccgagcatggtagcctgcgcctgtaatcccagctactcgggaggctgaggcgggagaatcccttgaacctgggaggtggaggctgcagtgacccaagatcacacccctgaactccagcctggataacagaaggaagggaaaggaagggaagggaggaaagggagggagaagaaggatgggaggaaggaaaagagggagggagggagggagggaaggaaggaaggaaggagagaaagagggaaggagggaaggaaggaagggaggaagggagggtaaggggaagggaaggaagagagaaaaagagagggagggaggaagagagaaagaggcgggggggagagagagaaagaaaaaagggaagaaaaaagagaaaggaaagaaagaaaagaatagggagctagaacagtacaaactacactcccatagaattctagcattccatgaaataaacagtaaaaactgaacattcgtgaaattttcccaattttctataaaatgttagtttaacttatacttctacccaatccaaaaaaaaatttttttaattgtatggaatttttttttaactgtaaaatgcactgtttcttgtctgctggtaagtgctatcaaagacaaatattggtcgcacgtggtggctcatgcctgtaatcccaacaccttgagaggctgaggtaggcagatcacttgaggtcaggagctcaagaccagcctggccaacatagtgaaactccgtctctactaaaaatacaaaaaaaaaaaaaaaaaaaaaaattagctgggcattgtggcgcacgcctgtaatcccagctacttgggagactgaggcaagagaatcgcttgaacccaggaagtggaggttatggtgagctgagattgcaccactgcactccagcctggacgacagagtgatccgtctcaaaaaaaaaaaaagataaatattaattaagcctgatacctgggctttggggaaaaaaagataaacattattgaattagtgattttagtgttaatgttaacagacgatgcttggagattatttactttcacccccatgaacatgtatgtatacttacacttaatgattttatgacataaagcagagttaatgtttctaatcaacctaaacttagagtaattaaatagatagctttatctagaaatcactattcataaaatataagtaaaaaatctaatagtgtatcattaccttcctcagagaatatgctgactgccaggacttctcccctcaaacttactgaagaacaactgccctagaggtagctatattctctcttggaatttcagaggctgccacagtggcttgtacctctgaactcaatgattattttttaaaggttaggggaaaaaaagtagccacaaatttcacggactattggtactatttctccagtgtgctataaccaaacttccaacacaatgcaagattttaagattctataaacttaataatataattcttatgatctattactattaggaatgctatcagaaaattctaaagtattcagttaaggctgattttttttaagcttatttatttcggagattacctcacttgctgaatcaggatgattagtcttgatttcatattccagcctgtattgaatgtaatccagatcagactcagctttctggaactaaagatcagcacaaatcattattgtgtaaaccaaaagactaatagtaaacatgatactttattctttttttctctttacatttgttagtatttcaataagtgatacatactcatttgaaaatgtggaaataaaaagtatataaaatatccattatccataataactatgctctatgaaaaatttaaaaagtagttaacattttaaagtcattcatttctctatgcctctctcttacattttgagccaaaatcaagatactgagtagccattgtcagatattaatacaaaaaactaataatgacgtcaataatttcctagggtcacagatactctcatcagttaggcagtgtttttctacctctggcagaaaatacactttcaatttaaaacacagaacaaatttatttcaggaatactcatattgttacctttatttgcaatcccattgatcaaagagctacaactatgtgccactaaaattaagagggcttaaagagtcacaaatttcacaagaaaagctacatatgatatgggagtaacagtctgaataaccccaatttactgaacctgggtgccagcatgggaacttgatctgtagtaaacctcaaaggaagaaaaaaggggagaactaccaccctgaggccattatggatataggatgcctgaattaaagtgaaaagttacatttaaaaatatcagtattggccgggcacagtggttcacacctgtaatcccagcactttgggaggccaaggcaggtggatcacctgaggtcaggagtttgagaccagcctggctaacatggtgaaacctcatctctaccaaaaatacaaaaattagctgtgcatggtggcagaagcctgtaatcccacttactcgggaggctgaggcaggagaatcgcttgaaccccggaggtggaggctgcagtaagccaagattgcaccattgcactccagcctgggcgacaagaatgaaactccgtctccacaaaaaaaaaaataagtatttggggccaggcacagtggctcatccctgtaatcccagcactttgggaggctgaggcgggcgggtcacttcagcccgggaattcaaggctagcctggccaacatggcaaaaccccatctctactaaaaatactaaaattagctggggatagtggcatgtgcctgtggtcccagctatttgggtagctgaggcactagaatcagttgaaccgaggaagcggaagttgcagtgagccaagattggccactgcactcctgcctgggtaacagagcaagactctatctcataaataagtaaataagtaaatatcaatatttggaataccatgccattattgaaaacgatgatatacaaaaaaatacttaagggggggctttcacattttactctatttctgtagtatttgtaatgagcagctatttaacctttcaaaaggtcatttgtttttaaaatgataatgtatagacagatttgacatgacactatatttatgactcattaaatacaaaaacagccttgagtatgttatggcctctttttgtaaaagagatgtatacatatacaaagttgagatggatatatgacagtgttaaaaagaattttctttttcttttttatgagacagggtcttgctctatagcccaggctgaagtgttgtggcaccatcatagctcactgcagtgtcaaactcctgggctcgtgggatcctcctacctccttccgagtgcacctgggactacaggcacatgccatggcacccagctaatttttgattttttacagagacaggatctcattatgttgcccatgctgggctgaagcagtcctcccacctcagcctcccgaagtgctggaattacagacgtgagccaccatgtccagcctaaaagtggtttatttctgcaagcggtataatcaatgaattattcttaacttcatgaaattccgcatcttttacaggaccttaaagcatatattgcctcgagtttatcagggatataactgtccttagagtttactacagaaaggaaaacatgatttccacaggcatggtctcctattcctatcccaaaacataggaggctgtttgcagggagggtgctgctcttattatgaactttatcactgaactaaagattgattctcaaaatcctgaagccttagtggaaggggaaaaactgttaaaagcagttctcaggtctaataagaaatgatgtacagttatttttagtatataaaaggttctattaggaccctactttcaaatgtagagtaagacaaaatggctgtcagaaattcaaatgcttctaaggtcagaagctgtcatcaaacagaatttcagaaataaactagtttccatcactaataatttctcttatcattgacctaaattggaatggaaaactctgcaatgaccaaaattctatctttatagccaaaacttggggggagggtacagataaaagaaagagaaggtttttgtttttaaacatattttccaggtcaatatcttatttccatctctaacatcagggagttgctctaagccagaaaaattaatgttgggtacataattacaaagtgtgtttaaaatgatttccaaaaagtggaagcttttcatttatcctctatacttgtcagatgagatgccacgattaaattaatcaataattacaactccttaaaaatactaatgtttgtgtctgtgtgtgtattaagaaattcctatttgcataatttctcatactaagatatacttagggattatcttttcctataaataagaaaagtacactaacccataaaacatgtggatggagagaatgaggagagaccaggagccagagcaaatcaaagttaacaaaggctgtgagcactcaagacctgattttgtttgtcttaattactgaacagaccacaattccatagcttttttcaatgagttatataacattcttaagcacaactttaaatacaagtctttaaagcttgttttagtcatttaatttaccataaattatggaatttgtggctccagagattcctaagacagaatctctattctagaaacccttaacatgtttatgaaacgaagtattaaacttacatattttttaacttgatatttagttctgcttgaagtttagcataatctcatgtagttccttgaatggtaactttcctttttttttttggaggagtcttgttctgttgcccaggctagagtgcagtggcacagtcttggctcactgcaacctctgcctccggggttcaagcaattctcctgcctcagcctcctgagagctgggactacaggcctaaattgtcctaaatttggcaactgagacctccaaggtttgaaagatttttacaataatctaacgtatatgtcacaaaacatgatgagtttgggggacacaaaactcccaaatgtagactatattcatatatatatttttgtcatttattttttttgagacagggtctcactctgtcatacaagcaggagtgcagtggcaacaactcggctcactacagccccaacctcccaggctcaacagatcctcccacttc[134 bp omitted]cggcctcccaaagcgctgggattacaggtgtgagccaccagcctggcatctttttaagagagaggtttccactatggtttcctgcaatacctaggggcccaaaatgtgttaaccatcaaatggtaccaaaaagaggcggtttctacttttaaataacttttattttaggaagataccaaagagtacccttctaatcaatggtatgatgaaatcaactaaactgtctttttttttttttttttttttttttagaaggagtctcactctgtcatccaggctatagtatagtggtgcaatctcagctcactgcaccctccacctcccgggttcaggcaattctcctgcctcagcctccaagtagctgggattacaggcacccgccaccacacccagctaatttttactcattttagtaaaatgggatttcaccatgttgcccaggctggtctcaaactcttgacctccagtgatctgccatgcttggcctcccaaagtggtgggattacaggcttgggccactgcccccagcctaaactgtcaagattttttgcaagacaattattaaacataggcatcattacaaattaaattatataaattagccggacacggtggctgaaaaaaatattttctaccacacccatcctgaaaaaatatatttaaaaaatatatttttaaaatatataaaataatttttaaatatatattttaaaattttatattgcatatttaattttatattttaaaaaatatatttttaaaaaatataaaataatttttaaaatatttttttaaaaagacaagaaaaacagcttctgctagatttgatgtgtacttgtagtcccagttacttaaagagctgaggcaggaggattgcttgagcccaggagttcaaggctgcagtgtattataatctctcctgtgactagtcactgcactccagcctgggcaatatagtgagaccccatctccaaaaggaagggaggaaggaagaaaaaaaaaacagcttgtgggtagaatgttatcctctgtggaaaattgtatagaacgtctaataacacacaggggcagtactgacttattattattatttagaccgagtttcgctcttgtcacccaggctggagtgcagtggcgcgatctcggggctcactgcaacctctacctcccaggttcaagagattctcctgcctcagcctcccaagtagctgggattacaggcgcctgccaccatgcctggctcattttttgtatttttagtagagacggggtatcaccatgttgggcaggctggtctcgaactcctgacctcaggtgatccacccacctcggcctcccaaagtactaggattacaggtgtgaaccactgtgcctggccagtactggcttattagtgaagtcagtgggctagggaataagcagggggcaaaaaggatgccaaaatgttgaaagatagaaaaataagcttttttttttttgtttgagacggagtctcactctgttgccaggctggagtgcagtggcacaatcttggctgactgcaacctccacttcccgggttcaagcgattctcctgcctcatcctcccgagcggatgggactataggcgtgcaccaccatacccagctaagttttgtatttttagtacagacagggtttcaccatgttggccaggctcgtcttgatctcctgaccttgtgatccgccctcctcggcctccaaaaatgctgggattacaggtgtgagctaccacgcccagccgaaaaatcatcttaaatgtctgctctgaacccttcattttataaatgagaaaatagcaaagtaacttgcctctagttctatttccattactgttttcttatgtagttagacaaagttatagatgatatttaagccattaagagtcacacatgtggaaaaaatgtaaattcttttttttctttttgagacagggtcttgctttgttgcccaggcgagtgcagtggcacaaatcacagctcactgcagcctcaacctcctggactcaagagatttgattctcctgcctaagcctcctgagtagctgggactacagacgtgcactaccaaacccagctaatttttgtatttttttgtagagacaaggtctcgctatgttacccaggctggacttgaactcctgagctcaaacaatcttcccgccttagcctctcaaagtgctggaactacaggtgtcagccaccacacccatccaaaaatgtacattcttcacctaaaattaaagtttttttatgttttaaattaatatcactaaagttacaaagctagtcaactaaaaattccctctgaacacaacatggtagtatggtacagaaaaataaaagaattcggatacatggtagaaattctagtcctagtatcactaaccagctatgtgtccctaggttaagtccctcatttctttgggtctctcctatcaaatgagttggaatctaagatccttttcaatactaaaattccattatttctttatactacaaataaacccatttgtcaaaaagaaaagttaccttcttctaataaattaaaaatttacatttaagcctcagattttaatgtttatagtgaaatctagttccttgttttcttcctaaagatgacttttgcttgtttctgctacatactttctgcagcctgcccattgttctttccaaacaccaaaaccctataagcaatattgcactactcagaactatttacacagcagagacaatattgatagggttctaggatctggtgataaacagaattttttttagttagatggcagaaattcactaagcaattatgataatctaaaactcattagtgtctgataaatcgcgcaaatttgattctgataaacatcattcacagccctttcagttacaaatcagcctcctggaagccttggaaatcagtgaggttattgtttaactttttaggggcaatggaatatttaaaataaaactagtgatttttgtaaagcccaagatattcgtatttcagaaaccagttttctctaaaatcagtaataaaaataaaggggaaaagttttatactgatctgaaaagtggtatataaaatacaaaattaggtgaaaaaagtctatggaaatcatcatgaaagcaccccaagggaaaccaggttacattctgccagttagatttctgattttttcctcctattttggaatatttgcataataattactggttgagcatccctaatctgaaaattcaaaatctgaaatggtccaatgaattttggattttggagcatttcagattttggaattttggattagggatgctcaaccagttgttttgtttgtttgttattttttgagacagcgtctcactctgttgcctaggctggagggcagtggcgcaatctcagctcactgcaacctctgcctccaggctcaagcaattctcatgcctcagcctcccgactagctgggactacaggcacacgccacaacgcctagtaaattttttgtatttttggtagagatggggtttcaccattttgcccagactagtcttgacctcccgagctcaagtgatctgcccgcctcggcctcctgaagtgctgggattacaggcatgagccaccgcgcccagcctgttctagtctagttttcaatatgaccagtttaaggctttaagtaagtggcacaaggtattccatactactcaactattaggcagcaaggagaaaagaatatattgcggttgtcacaatatactgtgtggtcctcagttttaaaacacttgctttttacaaacaacccctagattctcattgccaccgtatgctctcctacaaaggaccagtgcccttaaagctctaaacacatcctcttatgagagaccttatctcaacagcattaaattacataaagtgaaaaaaagtatttcagtctcacctatggtgggctaggcatagagaagagttggtagacaggtgt[136 bp omitted]cggtgaaaccccgtctctactaaaaattcaaaaaattagctgggcatggtggtggatgcctatagttccagatactcgggaggctggagcaggagaatggcataaacctgggaggcagaggttgcagagagccgagatggcgccactgcactccagcctgggcaacagagcaagactccgtctcaaaaaaaaaaaaaaaaaaaaaagaaatgcattttccatagaaacattttaagggagaattaagtatcttaatggaactagtttggctataatcaaaaaacctacttttatttttatttttaaattttttttgtttttgagatgagtgctcactatgttgcccaggctagtctcgaaatcctgagctcacgtaatctgcccgccttggcctcccaaagtgctaggattacaggtgtcagccactgcacccggccagaatctactttttgtacattttcttctcttcaatgtacatttagaaacacctttatctactctccttttactttgttcatggctttggtttaccatctactgtattatattttaatctatgtttacatggtaatgtcgccacatggtttcaaacatcttcctggcaagagatcgcttttttgtatccttagtttttaatatacagcctaatgtgcagtgacaaaagggaatagatgaaagaacaaacattcattcatttgaaagaacaaaccacctgggaacccaactaccctttaaaacacgttttaagggaaatatttcaagttcccagcaagctaaggaccacttatatcatgtctccacaatcaaaattggtttttgcctttttctgctggagaaagtattgactattacccattctctcttccaaacagaacaaatgcatgactatgcttgtccaaaacagataagcagtaacatgccctaacaccaggtcacagacatgttatttcaggcaattggcaaccagaggggataaaagtgagcaagggcttcaggttcatcagttcccaatctgcaagcttttttttttttttgagatgaagtctcgctcttgtcccccaggctgaagtgcaatggcacgatctcagctcactgggttcaagcctcctgggttcaagcgattctcctgcctc[134 bp omitted]cagcctcccaaagtgctgggattacaggtgtgagccactgcgcccggcccaatctgcaggcttttatggaacaattgctaggatatatacataagcccctgcctctaaaaggctagttttatttgtactatttatttttttatttttttg[135 bp omitted]cacacccgcctaatttttttttttttttttggtattctttagtagagacagggtttcaccgtattagctaggatgacctcaatctcctgaccttgtgatccacccgcctcagcatcccaaagtgctgggattacaggcatgagccaccgcgcctggcctaaaaggctagttttatcagtcaaagtagactacttaactttttttttttcctttgtagagacagagtctcgttttgttgcccaggctggtctcgaactcctgactttaagcgatcctcccgcctctgcctcccaaactgctaggattacaggtgtgagccactgctccaagccttaaataatttatgtaattcggctgggcacagtggcgcatgcctataaccccagcactctgggatgctgaggtgggtgaatcacgaggtcaagagattgagactatcctggccaacatggtgaaaccttgtttctactaaaaatacaaaaattggctgggtatagtggcgtgcgcctgtagtcccagctactagggaggctgaggcaggagaattgcttgaacctgggaagcggaggttgcaatgagccgagatcgcaccactgcattgcagcctggcgacagagcaagactctgtctctaaataaataaataaatagataaattgtgtaactcaaatgacagccgcggctgtgcacagtggctcaggcctgtaatcctagcacttggggaggccgaggcaggtagatcacttgagcccaggagttcaagaccagcctagccaatatggtgaaggtgaaacctcatctctacaaaaaatacaaaaactagccagtgtggtggcatgcacctatagtcccagctacgcaggaggctgaaataggcttgagcccgggaggtccaggctggattgagtggtgatcacatcactgcactccaacctgcatgacagaacgagaccttgtctcaaaaaaaaaaaaaaaaaaaagagagcctaggcatacttcaaaattatggcacgtgataccaagaaactcagtggcttaaaaactgatcatttattttcatggacctgcacattgacccggttcaggtactctaggctaggctgagtttggtggctttgcttcacacagcaattctggaggatgcctggtaggacctttgctactggtgtctctcatcctctttgaacccatgagatattctcatggagctagaggaaacataagagtaagcagaaagattcaaggtctcttaaaggcccaagttcaaagctgcacactgtcaattctacccacatgccattgaccaaagcacatcaagaggagaaaaatgtactctgcccatcatgaagtcatgacaaacatgtggatacaggcagaagtgaagaaatggggtgaattattcactttaccacaattcttctattttctttgagaacaatcagagtaggtcatggtagtacatgtaagtgacagggatggtgttattgcacgaatattcagataaattctttagtttatatatggtgggttttttttttttttttgagatggcgtttcgctcttgttgcccaggctggagtgcaatgatgtgatctcggctcaccgcaacctctgcctcctgggttcaagcgattctcctgcctcagcctcccaagtagctgggattacaggcatgcaccaccacatccagctaattttgtatatttagtagagatggggtttctctatgttggtcaggctgctctcgaactctcgacctcaggtgatccacccatctcagcctcccaaagtgctaggattacaggcgtgagtcaccgtgcccagcctatgtatgtatttttttaatttttatattttaatattaaaaaaaaagagagacagggctgggtgcagtggctcatgccagtaatcccagcactctgggaagccgaggtgggtggatcacctgaggtcagaggttcaaggccagcttgaccaacatggtgaaatcccatctctactaaaaatacaaaaattagtcaggtgtggtggtgggcacctgtaatcccagctactcgggaggctgaggctggagaattgcttgaacctggaaggcagaggttgcagtgagccaagattgtgccattgcactccagactgggcaacaagagcgtaaccccatctcaaaaaaaaaaaaaaaaaaaaaagagagagagacagtgtctcactgtgtggcccaaagctggtcctgaactccagaaatcaaaacaatcctcctgcctcagcctcccaaagtgctaggattataggcgtgagccaccatgcccagctaggtttatttttaaaagatgtctctcttatttatggtatcttgtagcaaatagagcaataacaagtatagaataatcaatatataatggttttaatcaggagctgttgaatttccctatattttatccaaaacttttttcttttttttttgagagagtctcactctgtcacccaggctggagtgcagtggtgcaatctcagctcactgcaacctccacttcccaggttcaagcaattctcctgcctcagcctcccaagtagctgagattacaggcccctaccaccatacctggctaattttcgttatttgttttttgttttaatttgagtcagagtcttactctgttgtccacactggagtgcaagggcgccatctcagttcactgcaacctccgcttctggggttcaagcgattcttctgcctcagcctctcgagtagctgggattacaaacgtgcccagctaatttttttgtattttaaatagagacagggtttcaccatgttggccaggctggtctcaagctcctgacctcaggtgatctgcccacctcagcctccaaaagtgctgggaatacaggcgtgagccactgctcctggcataatttttgtatttttctcgaactcctgacctcaggtgatcctctcgccacggcctcccaaatgctgcgattataggcgtgagccaccacgcctggccccaaaactttaactggatgtttacatgtagatgttttaaattaaggaatataggttcatgattactatagaatatgaatttaaaatgattaaaaatgtttaggagtgtgggcgcagtggctcatgcctgtaatcccagcactttgggaggccgaagcgggcggatcatgatgtcaagagattgagaccatcccggccaacatggtgaaaccctgtctctactaaaaatacaaaaattagcgaggcgtggcgtcatgcgcctgtagtcccagctactcgggaggctgagtcaggagaatcgcttgaaccccagaggccgaggttgcaataagccgagatcacgcccccagaggccgaggttgcagtaagccgagatcgcgccactgcactccagcctgatgacagagcgaggctccatctcaaggaaaaaaagtgtttaggaacctactcatagtcattaggatagtcaccataaaaaaaaaaaaaaagacaagtgttggagaggatgtggagaaactggaacccttgtccactgttggtggaaatgtaaaatggtatagcagttgtggaaaacagtatggtggcttctcaaaaaactaaaaatagaattaccatattatccaccaattccacttctgggtatacacctaaaacaactaaaaacagggtcttaaagagatatgtgtatacccattttcatagcagcattattcacaatagctaaaacaaggaagcaacacgagtgtccatggagggatgaatggataagtaaaatgtagtacatacgtacaatggaatcttattccgccttaaaaaattgaaggaaatctgcaatatgctgccacaaaaaaatggatgaatcttgagaacattttgctgaatgaaataagccaataataaaaagacaaatactgtatgatttcatttaaatgaggtatttagagtagtctaaatcatagagacagatagtagaatggtagttgctagacgctggggggaggggaaaagaggagtaattgtataatgggtatagagtttcttttttatgttttgagatggagtctcactctgtcgcccaggttcccaggttagagggcgacgctgcatcctccacctcccgggttcaagcaattctcctgcctc[135 bp omitted]tggcctcccaaagtgctgggattacaggtgtgagccaccatgcccagttgagagtttcagttttacaaaatgaaaaggttatggagatggatgatggtgatggttgcacaacattatgaatgtatttaataccacttaaaattgttaagatcataaacattatgttacatgtattttaacacaataaaaaaatagggaaaaaagttcacaaacgtaataaacagtatggtaagaaaacttaatagctagaatattgatcttactttctcaatactcctagctctccctctcaacagtatactgcaacccttgcagtttcccccagttgtacaataaacactcatctctggacgttcacatgtactatttcctctgcctggaatatttgccctctccttcagttggctaatccctactcatctttcaagtctcagattatatctcacctctaagaagaaatctttcccaggttagtttcctctttccaatgtgcccccataatatctagtatctatttttcccatcatgtcatctgtatttaatttatatgtgtacttaatcacagatacattagtcaacatatttatctgtgtctcccagataagtttcttaatatctttagcctctgttactagcccgatctagaaacacttaataaggccaggcatggtagctcaagcctgtaatcccaacaatttgggaggctgaggtaggaggatcatttgagtccaggagttggagaccagtttgggcaacaaagggaaaccacgcctctaaaaaagttttttaaactagccaggcatcatggtgcaacacctgtggtgtcagctactcgtaaggctgaggtgggaggatcacttgggcccgagaggtcaaggttgcagtaagctgtgattgagccactgcacaccagcctgggtgacagagtgagaccctatctcaaaaaaaaaaacaaaaggaaacacataatgaaacaaagtaggaagcacttttatctacaattaggcaaattaagtggggagagaaaggatttgtaaaactacagctcttacatttactaacaaaaatgtcttaaaaagttatatttattttgcagtcactaaatcactagatgaaaccttagcaaaaattggctaagattatttccttattgataaaatgagactacaccaggctcggtggctcatgcctgtaatcccagcacttttgagaggccaaggtgggaggatcacatgaggctaggagtttgagaccagcccggccaatgtggtgaaaccccgtcactactaaaaatacaaaaattagctgggcatggcgatgcacgcctgtaatcccagctactcgggagggtgacgcaggcaaatagcttgaacccaggaggcggaggttgcagtgagccaagatggtgccactacactccaacctgggtgacagagtgagactctgtctcaaaataaataaataaataataaaatgagaataaaaatattgaactcaaagaatcaaggactgattctaacttttaaaatgttatatattgagataaattagaagtacgagcttataaaatctaattaagaatagctattttatttatctgggatattctttctttcttcatttttgtttttgagacagggtcttgttctgtaacccaggatggagtgcagtggcagcacaatcatagctcattgcagtcttgatcttctgggctcaaatgatcctcctgccacagcctcctacgtagctgggactacaggcacctgtcaccacaccgagctaatgtttttacttttatttttagtagagacgaggtcttgctatgttgcccaggctggtctcaaactcctgagctcaagcaatcctctgtctcggcctcccagagcgctgggattataggcgtgagccactgcacctagccaatctgggatggtctttttttcttttctttttttttgggggggacgggcgtggtggcacatgcctgtaaccccagctactagggaggctgaggcagaagaatcgcttgaacctgcgagacagagattgcagtgagccgagatcacagcattgcactccagcctggacaacaagagcaaaacgccatctcagaaaataaaaaaagaaacaatgtcctcaaatgaaccccttggcccctcctctaggttattaaaaaaacaaaaacaaaaacaaaaacaaaatcaaaatcctacccactattctaacagcccactagagaacagtaagaaattgtaattaaaagccaaagaggaaagcagctgcgcttaaggccagggctggtaactaagaaagaaattttatatataagacacacacacacacacacacacacacacacacacatttggaataaaatggctttatgatgaggatttatgtccttcattctctacaaatgatgtccttgagttcatgcctaacattttaggtatctttcttccctctggtatctgtattttcccaactatttttaaaggacttttgcttaacaaatagcttactttcttctgaaattcaatgcgtttagaacccatgttgtaactgttcttgatctacttttttttttttaattttattagagatggagtctggctatgttgcccaggctggtctcgaactactgggctcaagtgatcctcctgcctcagcctcccaaagtgttgggattacaggtgtgagccaccgtgcctggcctttgctctatttttaagagcactagtagaaatcacactaaacagactattaaatattgttttaagcaaaaaaaaaaaaaaaaattttttttttatttgagacaaagtctcactctgttgcccaggcaggagtgcagtgatgagatcttggctcactgcaacttctgcctcccaggttcaagcaattctcctgccttagcctcccaagtagctgggattacaggggcacaccactgcactaggctaattttttgtatttttagtagagacagggtttcaccatgttggccaggctggtcttgaactccctcaggtaatctgcccgcttcggcctcccaaagtgctaggattacaggcataagccaccatgcccagccaaaaaaagaaaaaaagtttttaattttaaaaaattataagcagacctacacactgaaaattgcaaaactgtcgagagaaaattttagagacctaataaatgaaaagatatgtttgtgcaccagagggctcgatattgctaacataacaattctctatccggcacagtggttcactcctgtagttccagtactttggaaggctgaggcaggaggacggcttgagcccagaagtttgagaccagcctgggcaacataacaagaccccatctctaaaaaaataaaaataaaaaaatttttttgagataggatgtcactgtcaataggccggagtgcagtggcacaatcatggctcactgcagcctcgacctccccaggctcaggtgatcctcccatctcagcctctcaagtatgtgggactacagtcttgcgccaccacacccagccaatttttcaatttttctgtagagatgagggggttttgccatgttgcccagactagtacaaaaaaaatttttttaattagctaggagtggtggcacgtgcctgtggtctcagctacttgggaggctgaggtgggggagtatcatctgaatcttgggaggtcaaggctgcagtgagctgtgaccgccactgtactgcaacctgggtaatagaacaagaccctgtctcaaaaaaaaaaaaaaaaaaaaaagaaaagaaaataggcaaaagattgtgagacatttcactaaagaagatatacaaactacaaataagcatatgaaaaaaggtttaacatcattagttaaggaagtgcaaattgaaactacaatggggcaccaccacataactgttagaagggttaaaattaaaactgatatttttgcatcaacctaataccaagtgttgataaggttatggaaaaactagaacccttatcaatagctttgggaatgcaaaatagtacagccactttgaaaaatattttagcagttgcttataagatcaagcatactttttttcccccaaggatacatttatcaggctaccagaaatcccatttcagtatttactcaaaagaaatgaaaacattacgtccacacaaagacatactcatggcgactcactcccagaaccccagcactttgggagactgaagtgggaagatcatttgagcccaggagttagagaaccagcctggcaacatagtgagacttcatctctacaaaaaaatttttcaactagccaggtatggtgatgcacacctgtagttccagctactcagcaagctgaggtgggattgcttgagcctaggagtttgatggtacagtaagctatgatcacaccaccgcactccagcctgggtgacagtatgagaccctgtctctaaagaaaaagaaaaaaatattgctaaaaaaaaaattaaacaaagacatttgggagggcaacacaggaggatcacttgagctcaagaattcgagaccaaccacagccattttattcataatatgcaaaacgtggaaatgacccgatgtctataagttggtggataaagagtttgtgatattctatacaatgaatactactcagcaataaaaactgtccaactgctaatatacaacatggatgaatctcaaagcattatgctaagtgcaagaagccagacacaaaagactgtataatgtatgattccatttatatgaaattctaggaaaagttaaactagagatcagtggttgccagggacttggggaagaagaggttgaccacaaagaggcacaaaggaatgtaggggtctcactctgttgctcagcctggtctggaactactgggctcgagtgatcttcccacctcagccacccgagtagctaggtctacaggtgcaccaccatgcctggccacaaaggagctttttgtaaagtaacagaaatgttctatatcctggctgtggtggtggttacatgactgtatacatttgtcaaaactcgtcagttcactgggcatgccacacccctgtagtccaagctactcaggaggctgaagtgggaggattgcttgaagccaggagttctaggctgtgctgcattatgattgcctctgtgaatagtcgctgccctccagctgggcaacacagcaagacttcggctttgcttaacaaatagcttacttacttttattttatataattgtatctcaataaaattcatattttttaaaagtgatgaatccacactattgtatctcataagaataaactgtaaaacaaacactcttaggttttaaattcaaccatttcctagacaatacacaaaattaacaccaattaagatttggaggactaggcacagtggctcacacctataatcccagcactctgggaggccaaggcaagaggactgtttgagcccaggagttcaagaccaacctcggcaacacagtgagaccctgtctccacaaaaaatttcaagaaaatattagccaggcatggtaggacacgcctgtggtcccagctacttaggaggctgaggagggaggattatctaagcccgggagtacaaggctgcagtgaggtgtaactgggccactgcactccagcctgggcaacagagaaagactctgtctctggagaaaaaaaaatgacttggggcaagtaactgcaggaaaaatatacagcagaaattgtttccatcactaccaattcatcataaaactcaaataaaacctaaagtttgacagaacctatccaaatatgtaacagaaagcaacaaattataaagtattactcatttagacaaaccataacaacttagatataaaaaatattctccagacgtgtttcataatgcagtaaaatattgtttttaattagttaaaaggtttttttttttcaaattatgactttctaaaagatatactgttagtaacaacattatagttctcagcaacaaaggttgtggtaaattatttactgataccgaagaaagatgtaaggtaagaatcaaaattctggcgtgcatcctgctttcagatgctttgacaatactattgcactgctagctgtaaagtacagtagtgcaataaagtcagagcattcgttagcagtaataagtaggaaaggaacacaaaagcatcttgcatcggttgaagcttcagtgagaaacgaatttaaagtagggttgccattttggacagaaaaacatccaaaaccaaaaaacatttatatcaatgtttttttaaaaaaggataagacttaaatatcaaagtgatgttgcttattgatgactaatatacaaattaacattcgaacagaaacatgcatagatgtagaaaggaattttgtaaatatgccctaagccttaatagtaattagaatgggtattgttaatactttaggattggtattaacaaaaccagttataattactactaaggcaaagttgtgaaaaatatttttgttctctgcagagatgttggttagctccttcttcaaggcaatttactgattaaacgccatgtaaaacaagccctttgaataaaagtatcaaagaaaacaaatgaaaagtaaaataataagtttctcaatctctacatactcaatctatcactctggaatctaaaccactaaacaaagaaaacacaaaagcacttaccatcttacagctttttatcttgagtttactaagggctgtcataacaacagaagggaatcaatgtgctctaaacagaacattaaccctatctaactgaatactatccaaggggattttaaaatttcagttaactcctgaaatcttaaatagaggcagaaagcatctccatttccttcaaacttagaaatgtcaaagagaaaataatgatggggggaggtgggactgagatttaagtaacaagtttccttagttccaagctaattgacattttaacttttttaacggataagaacccaatcagaagtcagatgtaaacccagaaacagaaatagtatcatagtatcacactgcattaccttttgtgtacagtcactagtagtaccacgaaagaacaaagctaaacaaataccaccccatcattaagtgaaggggaaaaagtcagagaacaaagattgccctacaataagcttattcccccattagtaatgttgattgatgcaaaaatatattttcattattttcaccaacctccctttaaacggtccaattcaactacttagtcggattgagcctactaaggaaatgggctcatacaaaggacagctgaaatataagtgtcttggtgtcaaatcctgggccacataactaaaatattagaatatttaacgctggtagccaagtttcaggttttaaagacaactgtttaaaagataagtgtttaactttctgaattggaagttattacaaacaagaaaaatatttaaaaaatttaaggtattaacaaaattaggataaacactttcttttcaaattaaatattatgcatttccttttaccttgacaaatcctttatttaactgatgtaaaaccaaaaatcagaagatagcacaggaatcatttactcttaaaatcttataaaataaactggtccacaagtataacatttttttctagaagcacatggtaaatctgaagatgagatgcactgtcttttattatctagtcaacacaaagcagtaataattagagccatgataaaaattcatttctaaaccctaataattatggaaacaaactaataacctgaaaggaaaaaaaaaaaagctaccactaatttacttgcaaggatgtaagaaaggaaaaaaacctcatttctttttttcctgtcttcaaaaagaatttaaatactaccccatcattcaaacaatacctaaaagtttaaatgtctggctaccttataattttctaaaacctactttttcaaaatgtttacttcatcattgttcacttaaaagagaatttgttcaatctaaagaagtcctgtgagaatactgactctactgtaaaagccagacgaagtttaaaaattagaaacagccaatttgagaagcaaacaacctgttaaaagcagaattagcatcatttagcagaaatgaattatgaatttaagcagaaatatctatatcagtagggaggaattcagaatgggagaagggcaagatagtcttaacatttaagcctgttgacagaatcaaattacaatgcttaacattttgttttttttaaatgataataaaacttaaaactaaaagttcattattacaggtttgaaaatctgcaggaaattcttccttcttccctcccatttctccctacacttctccaaccccacacacactgcacaaagaaaatttaaacacaaaatgctaaaagtaattgaaagccttcaaattaaatttgtatatgagaggcactccaattcattagcacaacagaagaaaataagatatatcaaggcctcactttttctggggtgggaatggggggtgggtgaggtttcttccaggatcaccacccatcctttccaaggaagaagttagagacccaagattcagcttgaagaaagcagggcaggcacaaaggatacctaagcagtaatgccagggaatggcgtgggaaggagggacggattacaaacgaagaaagaagtcttttacttttttaaaacttaatcttttttttttttgagacgttgtctctgtcgcaaggccggagtacagtgacgcgatctcggctcactgcaacctccgtctcccaggttgaagcgatcctcctgcctcagcctcccgagtagctgggactacaggcgcgtgccatcacacccggctaatttttttatttttagtatagacggagtttcaccatgttggccagggtagtctcaatgtcttgacctcttgatccgcccgcctcggcctcccaaagtgccgggattacaggcgtgagccaccgcgcccggccaatcgtatttaacagacaagcaaacaaacaaaaaaagacaggagctcagtggcaggcgcttcctccaaagtccaggtttttaaggaaagcagcccaacctgggaaaaaaaaaaaaaaagaaaagaaaagaaaaaaaagataatgctgaacgaaaagggctgaagacagaacaaggacactaagaggaaaaaagcgcgggcgatcaagctggtaatctaaggatgggagggagggaataaagagaacaagtgagggacggatccttaaagaaaactaggacagccccccagctgggcgccccccgagcaggccaaacacgccagcaacaacgggagtgctttccaattcttcgcccccgttttctactttcacagatgaatgaaagtgcacaactccagagcaggatgcctttcctgtctcaatcccgcccgcgctccgggagcggagctcgtggttacgatccccttcgctcacacctcttccctcacccacggtttgccacctccggatcaaacagaaacgggttccttggccgttaggaagttgtgcatacaagtctagcatcctttctcagactttctcggcccgccttttagaacgtgagcgggttggccctacagggatttctcctcgcccccgtcagtttattccccaccccaccctccgttcccctttcttggagtgtgaaccacctctcccttcttgggacgcttagggaccgttccattcacatcttttttggtacaaacacagaatgcggtctgcacccggcgcagtttcgtaaggggtgtaaaggtgagggcaaggaacaaggaattccaaaggccccgcaccctcagcatctcccgccatttccctgacgagtttcccggatgtaaccccttacccgaggcggtttagacaccagacggtggcggctccctttggtgcaggaggagggaactcgactctggtccagcctccgccgcccggagtttccggcgactccaaattgtgccccacctccgaggccatgggggaaaaataaactacccagtagatctccttcactttgcactcaccatcagttccagcttatcgacctccgcctccatgttgaatagttgacattccgcagaccgcggcggcgcttaagccgcaagccgtactagcacggagggcctccattggacagctgtcactcaacatctcgcactcattggctcctccgttccaccggctcccgcccattggagactgggtaacgcccctctgcatgagacacattttcctgttgggcaaaggcacaaaacgccgcaggaggattggctgctgtgcaaatttttttttccattggctgccccctcctctctactttcaattttgtagttagggctctgcagagaagagcttgagattggtgcaattggaagaagagccaaccaatcacaccagagcttccaccgacagcagaggggacgtaacacaccttctttcccctccggctttccttccccttctctcccgccttctccttattcataccagaagcgcctcagctctgattggctggagctctgtgctatctcagccaatcacaagccgggctgtgctcctacaccatccgaagagcgaatcgtgcagagaccgtgtctacgattggcctctccctgacaaggatttaattttgaatttttctttatggcgtgggagaggccacagcccggactccatcgactcccccggctcttagactagtaagtgcaggaacgattatttctttgttatctgagctcgcgtcttgagtagctgggcctgttgctgcttgtgtttttatggtttagggaggtggggactttggctggacacgaaggggaaatggaaaggaggaaggggaggtttggggctggggaagaagtgctcggcctggcttcatcttaaccatacttctatttaattaacacttcgcaagatacgttttggagcaaagcatctgccttccttttgaacatttctttacatatttgctgctcaatgcaagtccacagatcagcggcatccgcatctcttgtttgcttgttacaaatgcaaattatcggactccacccaaatttactaaatcagaatatacattttaacaagatttccctgagtgatttctatgcacattaaagtttaagttggtacatttcttgactgggaatattactatgttactcgatattgtctggcatgctgttagagtgtcaattttaaatgcgtgtcctgtttactgagtgcctaatactgtgcgggatgagactttagggagctgcagtctctttggaaaaacaagacagaacaaaaacagcaatgcttaaaaaaaaaaaagcataaaacataaaatttaaaaaaagcaagtacccagaaatagtgctatgggtgttcaagaagaatcaattggactgctaatggaaattaagtaattgaaggctatttgtggaggagcgcaagagacttccataaaaatgtgttttaggaagatggcaatgaaatgcaacagtcatttccgttgctgctacagctttgaaagtaccccagaacaaagaacttttcttctctttctttcttttttttttttttctttttttgtgacggagtctcgctctgtcgcctaggctggagtacagtggcacaatctcggcccactacaacctc[221 bp omitted]agcagcagcgccaactcctgcaaaagactgtaattcttactgtattatttattgcatcttcctattggaaaatagctttagacccatcttttagccatatgaagatgtggtatgatatgaagaagtaaaaacctccctaaccaagagaatttgacaatattagaatatattccttaactaaaataacacttgctagctaacacttagcaggaatgcttcttttcattctttattgaatgaaacattatttagctcctgctgtattctagatgctgggaaaacaaagatgaatgaaatttgtcacacccttgaaaagctcacagtccagcaggatgacaaacatacaagcaaaaattacaatgaaatgtaatacattttataataaagatgtgtataaagtgctatagaagtgcaaaagagatgacatttcagccagtataaattctgtaaggaggctgggcatggtgcctcacacctgtaatcccagcactctgggaggatgaagcgggcggatcacttgaggtaaggagttcaagaccagcctggccaacatggcaaaatcccatctctactaaaaatacaaaaattatccgggtgtggtggcacgcccctataatcccaggtgctcaagaggctgaagcaggataatcgcttgaacccaggaggtggaggtggcattgagctgagatcacaccactgcactccagcccgggtgacagagcgagactctgtccacccccccaaaaaaaaaaaaattctagaaggacaaagactatgttggtgttgttcaggattgtatgccagcacctagcatagtacttggtggattataagcactcaactaatatctataagataaaataacagaatcttgaaggctaggtataagttgacttggaagaggatactctaaacagaaggaaaggctgatagaaagaaacagaaagtatttggtgtttagtatacctggaagtacaaaccgctagtcactagaagagactatggcaaagggccattagagctaagttgtgaaaagttttgaaaggcatgctaaggaatttaattttgtgagtaaaggaaccttcaaatacttttaagcaagggaatatctagatctcattttgttttaaagtatcagttctggtatggaaaatgaactggcaaggagaaagactgaaggcaggagaatcattgaaggaacactcagcaaacccaaactaagaaacattctccaaaacgactgacttggactcttcaaaattataaatatgaagaagcaaatacataaataaaaaagctggagaattgttatgaattaaagggtactaaagagacactactgctaaatgcatgtggaaccagggtgggagaagctataagggatattgagacaattggggcaatccgaatatgggctgtttattagatcatttcataacaaggttaaatttcctgactgattgtggttttgttggaaaatttccatgtttatgttagaaaacaaaagctaaagtatctaagagtaaagtatcatgatgtctgcaactaaatctattcaatccaaaactaaaaaaatttatgtatgtatatatttgtacatacgtacagaaagagtgtgtgtacaaagacggcaattgacaattggtaaatctaggtgaactgtatatgagtgcttattatactattgtaaattttttatttcctggagccttgaaatttttctaagtaaaaacagtaaaggaaaatagacaatagtgaaagacaaaaatgaaaaaagtgaaggcaactgaagttagaggacagaacggagggggatggtaaggagaagagacagggtaaattaatcagagaaatatttctgattcatactcacattggcccacacccaggtgtggtgtgcacccagtgcagtggcgtgatcttggctcactgcaacctccacctcctagattcaagtgattctaatgcctcagcctcccgcgtagctgggattacagcacactccaccacacctggctaatttttctattttcagtagagacagggtttcaccctgttggtcaggctggtctcgaactcctgacctcaggtgatccacccacctcagtctcccaaagtgctgggattacaggtgtgagccaccgcacccagcctcccacaccctctttttttataaccctctactccaataggagctccattgtctctgcattcttttcaccttcctggccatgccttttctagttctttctctacccactccttatacatggtgtttctcaaagtttggtaatcagctcatagatcttttcactccacatatttctctgggtaatttcactcatttctagtgttgttattttctcaagctacctatacacttatgagtgcagtatttctctagtgtctttcccctgaacttctgactttgaacatagaacataagcagttagatgtatttagataccctactgtcgctcctataatcaggtcctcatcccctagacagttgcagtaggtttgtaagtggtctctttgtcttcagtcatggtcccataaatccaatttccacgatgctgccaaaccattctttctaaagaagaaatacgagcatgacaattatctgcttaaaatccattattgtttctgatgtcttggtccttatccaccctccagcttcatcactcattgccccctgacaaaactttacgttgcaggatatgctttagtcacactgagtcttgtctgaatcccctgacatacctttctctgaaatgtttccatgttattccctctgatgggatgagtcctccctaggcccaccttaacctagccccttcatcaaagctcagcttaggcaaaaccttttccaaaaacctcaacccttatgggagaattatgtacccttgctttatttctccattaatatcatatacatatcccatcataacccatacactattgtatacctgtttactttctgcttacccatctctccccactgtaaactcttggagggcaggaatgtgtcttattcattttcatagcaagttatcactatatgttgttgaattaaacttgtattttaaaaaatctgatatagtaatctcaagcagcaaaaaaaaaagaatcaaagaataataatgataataatgataaaacttattgcctgccaggcactgtaaatactttacatgatttactcatgtactcctcaaaactctgaagtaagttcctattaatattattatttcacaggggaggaaactgacacagaaaggctaagaatctcttgaaggtcataaataagttatgacagtatagtagagccatgatttgaacctatgcagtataactccctggtcctcatccttaacccctacagtatacttcctcttgttgtttgtttgtttggttggttggtttcggttttggtttgggggttttttcttagactgaacctcattccaatttttatatttttagtagaaatggggtttcactgtgtttgccagtctggtctcgaacttgacctcaagtgatccatccacccaccttggcctcccaaagtgctggaattacaggcgtgagccaccatgcacggcctataatatgacctttattattgtttgatttgttatcaagagctccagatgtaccagtttgctggttccttagcctagaaatcttttcttaatgaaaagaagatgtaagtaaaaatgagagtaatttctagagatcatagagttatttaggatatttatgttgtttttttcttttttttggaaacagtttctcgctctgtgttccaggctggagtacagtggcgcagtcatgggtcactgcagcctcaagctcctgtgctcacgtgagcctcccgcctcacccttcagagtggctaggactataggtgagccaccacgccaggattttttttttttctttttttcatacagttgggactctcactgtgttgcccagagtggtctcaaactcctgggctaaaggcatcctcccacctccacctcagcctcccaaagtgctggggattacagcactttgaaccaccgccctttgcctatatgtttatgtttctaatgatttttcagattatttgagaaagcagtgtaagaaaaaaactagtttaaaaaatacataggccaggcatggtggctcatgcctataatcctagtactttgggaggccgagggaggcggataacctgaggtcagcagttcaagaccagccaggccaacatggcgaaaccccatctctactaaaaatacaaaaattagctgggcgtggtagtgtgtgcctgtagtcccagctactcgggagactgaggcaggagaatcgcttgaactcgggaggcagaggttgcagtgaaccgagatcatgccactgcactccagcctggccaggcaacagagcgagactccgtctcaaaaaaaaaaaaacaaaaacataaaacaaaaaaaaaaacacacacacaaaacataagggccgagtacagtggctcacacctgtaatttcaccactctgggaggccaaggccagtaaattgcttgagctcaggagtttgagaccacctaggcaacatggtgaaaccctgtctcaactaaaaataaaaaaaccagctgggcatggtggtacgcccttgtagttccaactactcaggaggctgaggcaggaggattgcttgagtccaggaggtcaaagctgcagagagctgagatcacaccactgcaatccagcgtgggcaacagagcaagaacctgtctcaaaacaaaaggaaaaatgctttaaggaatcacaaaagaatgagcttctattcagtgttaacaattaaaatcccacctaatccagcaaaaagaatttgtaggtctcattatgcttttggaaaggggataagtatacgtattttaagctaaaggaagactgctatatactctttcaatttgggcaattatcctctggaaagtacctaatgcttttaattaagtaatgatactaaaacaaaccttaattttttgtgttcttgttttgactgaggtagaaatttgctattctccactttcgcaagagctgtgattatttttggatggaacaactaactatctaggaattatctcagactgcatctttctaccctgacagattttgcatggttccttaatcctctgcatgtgccaattactgtatttaattagaaggagattagatagaagcactaataacccaagtcagacacacacacacacacacacacacacacacacacacagagagagagagagagagagaaagaaatatgacttagttcctagacatctttatcattgaaaaataattcccaaaatgacagacattggcttgtgtaggactctagaaatttgtatgcatagacactggaacagccaacaggaaaggactagaaagaaatggccctgtttcagaatggtggtactcaaattttccagctaatggtacataccaaagtttgaaagtcaaatacaatacaagccttattagaattagaaagaaataacaaaaaaaaatagcagtccagtttaaaccacccctctgtaatcctgactcccaattgtcagaggcaacactattaagtcttgtaattatttcttctggtatttacctccatatttctaagtaacattcatactattatttcatgatttttttttcaagtgtaggcactatataaatttagacaaatactgacttccattcactttctctccctttttttttttttttttttgagacagagtttcactcttgttgcccaggctggagtgcaatggcacgatctcggctcaccgcaacctccacctcctgggttcaaacgattcttctgcctcagcctccaagtagctgggattactggcatgcaccaccacgcccggctaatttttgtatttttttagtagagatggcatttctccatgttggtcaggctggtcttgaactcccgacctcaggtgatctgcctgcctcagcctctcaaagtgctgggttacaggcatgagccaccacacctggcccactttctctccttcttcctagtatacctacatcatcatttttggttaaataaattgtcaatgcttatactttttttttttagatggactctcgttctattgcccaggctggagtgcagtggcacaatctcggctcactgcaacctctgcctcccgggttcaagagattctcctgcctcagcctcccagatagctgggactacagccacatgcctggctaaattttgtatttttggtagagacaggcttttgccctgttggccaggctggtctcaaactcgggacctcaggtgatcctcctgcctcccggcctcccaaagtgctgggattataggcatgagccaccatgcccagccaatgcttatactttaaatattgtttaacagcttaacatttagtgctactaagattacatttcctttcttatacaacttttttcctagctattttttatatgcttatttttttaagcacttaccagcaatttggccacaagtttacagaacagtaaaactctgctcagaatggtcaaacacactaggcagtttatctatttccgtttttccttagagacattgttgctgaagccctctgtcctgtccttctgcggcagtcttcactggctgtgagcctcaggtcagcaaactactgcttttatagagcttgtgagctaagaatgatttataacttctaacagttaaaaaaaaatcaaaagaggaacaatattttgtgacacatgaaaagtatatcaaatttggccgggcgcagtggctcatgcctgtaatcccagcactttgggaggccaaggctgatggatctcgacgtcaggagttcaagaccagcctggccaagatggggaaaccccgtctctactaaaaatacaaaacttagcctggcgccgtggcaggcgcctgtaatcccaactactcaggaggctgaggcaggagaatcacttgaacttggggggtgggcggaggttgcagtgagctgagatcatgccactgcactccagcctgggcgacagagtgagactccatcttaaaaaaaagaaaaacataaaagtatatgaaattcaaatttcagtcataaataaaattttattagacacagctcctttgcttgagtattgtctatgactgccttggtgctaccctggcagggttgagcagttgcagcagagaccatatggcctgcaaaacctgaaatatttactttctggttctttacaaaaaaggtttgttgacccctgtcctaagcttgctcaaagctgtttcccctagatttttttatcaccattatcctgaaaattcttatcttttatcttaattctttcctcacacctgactgaaagtttggcctaatatagaattctatgatggggccgggcgtagtggctcatttctgtaatcccagcactttgggaggctgaggtaggaggactgcttgagcacaggagtttaagaccagcctgggcaacagaaaaagaatgggggaggactgtgaaggatcagatggaagacaaagaaaaggaagatgctaggaaatttcggattctagggctcccaatcagtggactcagccttagatagaagtttccagtggcatttgtctatagaaggtcctggccgtacaggacttcaagaccagcctggccaacatggtgaaaccccatctctactaaaaataaataaattttaaaaattagccgggcatggtggcgcgcgcctgtaatcccagctactccggaagcggaggcaggagaatcgcttcaacctgggaggaggaggctgcagtgagccaagatcatgccactgcattccagcctgcacgacagagcaagaccgtgtctcaaaaaaaaaaaaaggtcctgaccatagatttgatgaaatgtaaccttttttcttcaggcagccacaagatcgctccttcctaggaggctctcctaaatatcttcatcagagtatttttatcttgcgtttttgttttgtttttttgttttgttttgtttttgagacagagtctcgctccgtcgcccacgctagagtgcagtggctcagtctcggctcactgcaagctccgcctcccaggttcacaccattctcctgcctc[224 bp omitted]ggtccccctctgttgcccaggctggagtgcagtggcacaataatagttcattgcagcctcaaactcctaggctcatgtgatcctcccagctcagcctcctgaatagctcggactacaggcttgtgttgttttaaattaaaaaaaatcagggctgggtgcagtggctgacgcctgtaatcccagcactttgggaggccaaggcaggcagatcacttgaggtcgggagttccagaccagcctgaccagcatggagaaaccccgtctctactaaaaatacaaaattagccgggcgtggtggtgcatgcctgtaatcccagctactcaggaggctgaggcaggagaatcgcttgaacctgggaggcagaggttgcggtgagccgagatcgtgccattgcactccagcctgggcaacaagagcaaaactctgtctcaaaaaaaaaacaaaaacaaacaaaacaaaaaaatcctttagacatcccttgtgtttaataatccctgcttcaccttccttcattatttcagcaggaagaaaaagtgatataataaaggtgaagtcagccaactatgttttggtgtgttttctaagcccgtaaggacaattaagaaaagcaccttgtcaaattgggacctgatagttagtccaattagatgttatcaggaatctatttctagaagggctgtcaatatatgcactgccactatttgccattaggggtgccctctgcaaatcatggaaccaagccagcgctcagtttttacaacctgcaacagggtagtgggggttcatcagccagtggaatctgagagctgagcaagtatagtgctgcataccaagtgctgaaaggttactgagtgaacaaaagtggaatgaatgtgtattttaaaggccaattgttcccattcaaatctgagtttgaagggaaggaggcccaggccttgagatcattttcagttctgctacttgaataacaacatctttgttcctcaagtagcaacaactaaaagcagcaaagcccttctggaacttcagctcaaactagctgtgacttaattttcttcagaaaaggatccagattgaaatgtgaatatactagataatgtttttgttttgttttttcattttgtaccacagcaagaaggacccttttattaaaagtttccaaaatgttcacttggtcacaaccaagataatgttaacatatatttaatggtaatatatttaatgttaaattgatcattatgatatatacttatatagatatatgttagtgtatagcatattagtgtgtatagcatcttagaaagaacagatatatttatataaaaatatttgttacattcttaagtacaaagcagcttttattctcttgataattcttgattatatcccgacatttgtataaaaaattcactttatttagacagatcctaatttgctgttagtgtatcaagtggcattgccactttttatttttttattttttaaattt[133 bp omitted]aaccccgtccccactaaaaatacaaaaaattagccaggcgtggatggcgggcacctgtagtaccagctactcgagaggctgaggcaggagaatggcgtgaatccaggaggcggagcttgcagtgagccaagatcgcgccactgcactccagcttggatgacggagcaagactctgtctctaaataaataaataaattgaccaataataattatacatatttgtggggtacacagtgatgttttgatacatataatgtatagtgaataggtcagggtagttagtatatccatcatcttcaacatgtcatttatttgtgttagtaaaattcaatgcactccttctagctatttgaaactagataatatattattgttaactatagtcatcctacagtgccatagaacactagaacttattcctgctatctagctgtaattatattactggaaaggggtcccaatccagaccccaaaagaggattcttgtaccttgtgcaagcaaaaattcaggacaagtccataaagggcaagcatgtctattaagaaagtaaaggaataaaaaaatggctattccataggcagagcagtggcatgggctgctcaactgagtatacttatatcttgattatatgctaaacaaggggtggattattcatgagttttctggggaaagggtggggatttcccagaactgagggttccttccctttttagactatatagggtaacttccagacattaccatggcatttgtaaactgtcttggtgctggtgggagtgtcttttagcatgcaaatgcattataactagtgtataatgagcagtaaggacaatcagaggccactttcattgctctcttggttttggccacgttctttactgcatcctgttttatcagaagggtctttgaggcctgtatcttgtgccaacctcctatctcatcctgtgactaagaatgtctaacgtcctgggaatgcagcacagtaggtcttagcctcattttacccagctcctattcaagattgagttgctgtggttcaaatgtctctattttgtatcctttaaccaatctttccctattcctccttcctccccacctttcccagtatcctgggaaagatactatccctctagtatcctctgttctactaggtaatgtttttattttattttattttattttattttatatatttatttatcagatggagtcttgctttgtcacccaggctggagtgcagtggcgtgatctcggctcactgcaacctctgcctcctgggttcaagtgattctcccacctcagcctccccagtagctgggaccacaggcaccgtgccaccatgcccagctaatttttgtatttttaatagagacagggttttgccatgttggccaggctggtctcaaactcctggcctcgagtgatctgcccacctcggcctcccaaagtgctgggattacagacgtgagccaccacacccagccggtgatgtttttaaatgctttaaaataactcttttaaggcccatgcctgtaatcccagcactttgggattacgccaccagtgtggtggcgtgtgcctgtggtcccagctacttgggaggctgaggcaggagaatcatttgaacctgggaggtggaggttgcagtgagccaagatcatgccactgcactgcagcctgggtgacggagctagactgtgcctcaaaaaataaaataacataactgttttaaaacactcatgtcttagatttggggtaattgttatttcattttacagtgtattgcctatttaatctagtgtcacaccacagcgtattagaaagaacatggaagacttacaggtttggacttactgcattgcattgacagattgtctaatcttttttatcctcagtttattcttctgtaaaaacgggaataaaaatcctccttgtcagggataataccttgcaggatagtaagggttaactgaaaagatgtatgtgaagatacctaacagtaaaggggtattgaataaatggttaatgttgtttccttatcttctcactaccaattccacctgtcacagtggatgctcagtagatgctgctggtaaagaaacatattctttttttttttttttttttttgaggcggagttttcgctcttgttgcccaggtgggagtgcaatggtgcaatctcagctcgccacaacctccgcctcccgagttcaagcgattctcctacctcagcctccccaatagctgggattacagacatgcaccaccatgcctggctgattttgtatttttagtagagacggggtttctccacgttggtcaggctggtctcgaactcctgacctcaggtgattcacccgcctcggcctcccaaagtgctgagattacaggcatgagccaccacacctggccaacatattattttaataactgactataacccacctacagccattttcgctactataaagaaaggaaaattcatttaacttaatgaagaaaagcaacacaagcaaaacaaactgagagagtaatataatgccaagaccaagatctctccagagatagtttaaatctgtgtttacattttcccctacttcagggctcttctgggatgctggtagtgacctatttcttaaccaagatggtggtttcaagggtgtgttcatggtataattcattaactatacacttaagatttgtgtactttctatatgtatatattattcttcaattaaaaatgtaaaaaaatttctctgcagaaatcatgcccaagttcaaacaacgaagacgaaagctaaaagccaaagccgaaagattattcaaaaaaaaagaagcctctcactttcagtccaagctaattacacctcctcctccaccaccctcaccagaaaggtaaggcttaatgtggaacagaaaaaatattagagagatctgatcagtttaagatagagtt[131 bp omitted]caaaaccctgtctctactaaaactacaaaaattagcctgcgtggtggcgggcaactgtaatcccagcttctcgggagacttaggcaggagaattgcttgaaccagagaggcagaggttgcagtgagccgagatcacaccactgcactcaagcctgggcaacaagagcgagactccctctcagaaaaaaaaaagaaggcccagttaaatttgaatttcagataaacaatgaataattttttcatataattatgtcctatgtgacatttggaatatatttatactaaaattatgcatgctttatctgaaattaattttttattttaatttttatttatttatttacttttgagactgagtcttactctgtcacttaagctggagtgcagtagcatgatcaaggctcactgcagccttgatttcctgggctcaagagatcttcccactctgtctccaaaacaaacaaacaaaacctctagcttgggattggccttctcttctattatttttctttttaaaaaaaattttaaaaaatagatgttgatgctgtgttgcccaggctggcctcaaactcctggcctcaagtgatcctcccaccatgacctccaaaagtgctgggaatgtaggtgtgagcactgtacccaccctcatgtttttttctacataaaaaataatgcaggattatcttctagagctaattagtatgatcaaataaccaaaaccccattaaggaaaaatgtcacatgacagcaaataatcaatccagaccaatatgatcacactcactgtgaaggtgagaaaacttcatctttattacgtttccccaacagacgcactgcattgttctcttgaaaacacacagctcatgtcctcctttaaaacccacatcctctttaaagtaacacacggccaggcgcggtg[170 bp omitted]ctgaagcaggagaatggcgtgagcccgggaggcagagcttgcagtgagccgagacagtgccactgcgctccagcctgggagaaagagcgagactccgtctcaaaaaaaaaaaaagtaacatacaaacatgacaatacaaagtaaaaaattacatctgaattctcacatttcaaaaacatacagtaaacatcaaataaaaatttatttttataagaatttaggggaactatcatgtagctataagtgtaatacatatattaagtatcatagataaaaggagtgctcccttcagcagcacatgtaaccatagatacaaagatttaaatataaaagatttaggataaaaagaatcctctcttaaaaaggaaaacaaaattatatgtatatagcagctatgacacccatctcacaactttacaggaacagtatccaaaaataccagtattttcaaaatatttaaaataaatgtagtaataattctatgcccatctttttcaaaataaaccaataaaatatatagtatatattagacatgttagtatatctaagacatgttaaaaattacaactgaattctcacaattcagtcacaaatctaaacagcaaataaaaatttctatgacaggaacttagggtaactaccaatagctataaatagaagagattattatgtaagtatcatagataaaaagtgtactcgcttcaggggcacatataataatacagaaaacatttaaagataaaagatttaggataaaaaggattctctgttgaaatgaaaattatctttatatatatatatacataacagctataactcatgaaaaaatctacaggaacagcatattttcaaaagtacaacaattttgaagctatttgaaataaacctattaataattcgatggccaacattttccaaacaaaccaataaatgcatagtgtgtatgaagctatctgttacagtctatggcactcatatttttacaaagaattctgtgctaatctgagtgtctgcactgtgccttcaaatgctcttggactgtggcaaccaagtccataggaaagaggacctccaggttccgccccagggaggttggaattcagcggtataaaaatagaggtggtggtgcagaaaggggtggaaccagaaacacccctggtttctcactgttctctatggattcctagaagtgagaggtgacagcgtgctggcagccctcgctcgctttccgtgcctcctcacctgggcgcccactctggccagccttgaggagcccttcagcccgccgctgcactgtgggagcccctttctgggctggccaaggccggagccagctccctcagcttgcggggaggtgtcaaggaagaggcacgggcgggaaccggggctgcgcgctgcgcttgcatgccagcttgagttctgggtgggcgtggtttggcggcccccacactctgagctgtcggctgccccggccagcccgggcagtgaggggcttagcaaccggaccagcagctgcagggggtgcgcggggtcacccagcagtgctggcccactggcgctgtgctcgatttctcgccgggcctcagctgcctccccgtggggcagggctcgggacctgcagcccgccatgcctgagtcttccctgccatggtgggcccctgcaccacctgagtctccctgacgagcgccgccccctgctccacagcacccatcgcatgcccgcccaagggctgaggagtgtgggcacatggcgcagggctggcaggcagctccaactgccctcccggtgcgagatccactgggtgaagccagctgggctcctgagtctagtggggacttggagaatatttatgtctagctaagggattgtgaatgcaccaatcggcactctgtatctagctcgaggtttgtaaacacaccaatcaacactctgtgtctagctcagggtttctaaatacagcaattgacactctgtatctagctaatctagtggggacatggataacttttgtgtctagctcagggattgtaaaggcaccaatcagcaccctgtgaaaatggaccaatcagctctctgtaaaacagaccaatcggctctctgtaaaatggaccaatcagcaggatgtgggtggggccagataagaataaaagcaggctgcccaagccagtagtggcaaccagtgggggccactttcacgctgtggaaggtttgttctttggcactttgcaatgaatcttgctactggtcactctttgggtccgcactgcctttatgagctgtaacactcaccatgaaggtctgcagcttcacttctgaagccagtgagaccacgaacccaccgggaggaacgaataactccagacgccctgccttaagagctgtaacactcaccgcgaaggtctgcagcttcactactgaagccagcaagaccacgaacccgccagaaggctgaacacatctgaacatcagaaggaacaaactccggacacgccacctttaagaactgtaacatggcgagggttggcagcttcatttttgaagtcggtgaaaccaagaacccaccaattccagacacagaagtacccccctggttctgggaggacgacttgatcactctattcagctccgtctagaacagtccaggttcttctagatgatctgcacaaatggctcctctcctccttcctggtgtctgtcattagcaatggaataaagttcctgctgaaaattcacatctcccctggatccggtgttctggaagtgagagagaggatgtcatacttaaaggaggcggctctctagacaggaaggttattcacgtcccacatcaagtctaactagagttcagagcagttgagaaatcaaattttatctcctgtccttcattctatagcctgcttctgaaccatcgtgttcagctgtgaaactcacagtttggtaaccctgactccaaaactcactcaatatacccaaggtcagccccagtgatctgcttcatagcaaggactttgggtgggtctgcccagggagtagggcaccctcaaagaatgtggctttggacttcatcacaactggggccttttgcattacttaagagctaaactcgtaaccatgctagatccgtttctaatgtgacaacatcacaaaccctgagtccagaagcctaatccataatcctacctcctcatgatgaagtctcatgctctgtgctgaacgtggttagctgcacaagatgtgaaccaaagcttcactgaaccctcgacccaaatcggtaactcaagtgtgtcaatcataatgaacctccccgaactcagtatttatgattatttttgagtcagggtctcactctgttgctcgggctggagtgcagtggcaggatcagggctccctgcagccccaacctcccaggctccagtgatcctcccacatcacctggctaatttttgtatttttatggagaggggatctcgccatgttgcccaggctcgaagccggatcaagcaattgggttcctcggatttccaaaatagaccccaatattctgcctttaccccagaggacacagatgtaccttccctcaggctgatgacctcaggcctcacagtccctggagctctaggaaacgcggtgcgatctcgtgcccacacccagtgctctgggttataagcctggatctggaaaaacaaacgccccttaagaagatggggactccccaggatacccctccctccccttgtccagcctccagcccacctgattcctccccacctcctccacctacccccaccccgcctacctcctccaactactccagggaaacccaagccctccagcgcatggaacggaagaactggaaccgaagtttatggaacaagggtatctgggagtggttcttcccgtacaggaagtagaaaatgtttcatttggaggcctcgttgtcctcctccatgtcattggccaggtagctggggacagaaatcaggttgccgctcagggacaccaccaggagagacctctggctgaggtcagcttcccagagaggagggcaggggacgatcctcagctcaggactggcacccaccctgcagaaccatgccttcctcaggagggccctgattgtcagagacctgctgaagggcgtctcccactccttcaggatgaagacaaaaacccaactggtggccgagagtggtggcttacgcctggaatcccagcacattgggaggctgaggcaggaggatcatttgaggccaggagtttgagatgagcctgggcaacatagcaagaccctcgtctctataaaaaatgtaaaagacacgccagacgtggtggctcatgcctgtaatcccagcaatttgggaggctgaagcaggtgggtcgcttgaggccaggagttcgagaccagccccatatctactaaagatacaaaaatcagcctggtgtggtggcacacctcttagtcctagctacgcaagaggctgaggcacaagaattacatgaacccaggaggaggaggttgcagtgagccgagattgggccactccattccagcctcagaggcagaacaagactctgtctcaataaataaataaataactgtccaggtgtggtgtcacagccctgtagtcaaagctaatccggaggctgaggtgggaggatcactggagtacaggatatggaggctgcagtgagctatgatctcaccactgcactccagcttgggggacagggcaagtctgtctcaaaaaaataaaagaaattgaatacattgatattgtgccaagaccctgccttctacaggcatctagtctaatgggactgggagtaatcagggcagatgacgtaatcccaatatcacattataataggatgtaactggagagctacaagcatgtaaaagttgcaagatgagggaaggcatcacagaggctatggggtgaactgactttaaggaatgggtccttcccttcagaaccacatgtgtgcgggacacccagacagaaaacacaaacgcaaagtcgagtggagggcatttggaaagagcggtgaagccacaccaggaaacaccaagatggcgagccagtttggttgtagagattatagagagggtggaatttgcactgtggaccctggcctcaatttagaaagacatcagctaaggaagttgttcaggtgggcagtgagggtgttgtgctttggaaagacgctcaggctgcactaggaagcccccaggcttggggagagactccaggaggccccagcagggagcatttgacagtggattcgagtgatgcaagggggacctgaactgttgcctctgtcatgggaacccggaggaggtcgatggcgtttgcagttgatatgggaaggagagagacagaagaaccagaaatgtctgcttgctgggggaagcatcgtgtccgctcctttgctccttttcttctccccttaggagcggtttatggttccttttgttttattcttttatttgtacactggcgttggaatttggtttttttggcttttttttttttttttttttttttttttttgagaaaaagtctcgctctgttgcccaggctggaatgcagtggctcaaacttagcttactgcaatgtctgcctcctgggttcaacgggttctcttgcctgagcctcccgagtagtttggattacaggtgcacaccaccatgcctggctaatttttctatttttagtagagatggggttttgccatgttagtcaggctggtctcaaactcctgacctcaagtgatctgcttgcctcggcctcccgaagtgctgggattataggcgtgagccaccgcgcccagcctgagtttctttttagaaacagcagtctaaaaacaagatagtataatcctcttttttgtacacagagtaaagaggacaaataggtgcaagaataaatgaaaggctggaatcccacttcccccgctgtcccagggtattggatattgacagataggaggaagcaaaccactcacagagccaggaataaatgaatgcattggtattgccgggagaagaggccggcgcggctaaaatatgctatgaccatagccaggagatactggtggagagaaaggaacacagaaagggagaggtcacatcttgggagaggaagatcgtggagacagtggaatgggggtctagggagggtttgcccatcagagaagggacctgagtgttggggtgactgtgctcatgtggaaattgcggggtggtggggtatttgaaggtcggatgcaaatccgagaagctggaggaaggcatgttggtgatgctcccaggatggtgggctctgatgagatctttgaaggagtgtgtctaggtcggctggtatcaggagggtcttttgtgtgccaggcagagaactgtcccaaagaactgagagtaaaggggctaggagcttcagggctgcggcctgactgtggcccagagctcagatcccaaatgacccataggagaggcaggggccactcattcactcagcaagagaccagcagagtcctgagggagatgctgacaaataataaaaagaccaagaatagccgggagtggcagctcaagcctgtgatcccagaagtttgagaggctgagacaggaggatcaagtgagtccaacagttctagaacaacctgggcaacatagcaagactgtttgtataaaaattattcgagcatgatggcatgtgcctgtactcccaactgctcaggaggctgaggcaggattgcaagagcccaggaattagaggctgtggtgagctgtgatcatgccactgcactccatcctgtggaacacagctagatactgtctcgaaaaaaaaaaaaaaacaggtgggcaccaagactcaagactgtgggagccagaggggcacagtggctcacatctgtaatcccagcattttgggaggccaaggcaagcggaacacctgaggtcaggtgttcaagaccagccaggtcaacatggcaaaaccccatctctactaaaaacacaaaaattagccagccatggtggtgcatgcctgtaatcccagctgcttgggaggctgaggcaggagaatgccttgaacccaggaggcttcagctgcagtgagccaaggttgagacactgccctccagcctgggcaacagagcgagactgtctcacaaaaagaaaagaagactgtgggagcatctggtgggaagtgctggagggagagaagagaggaactgtgggtttagaagctgcaccctccccctggcagtgcactgaagcaggaacacggttccgtggagaacaaacttaccttgtctgacaacctcaaatctttgtcccaggcgaggaagcttttaatgacaggatcctctgtgattagagagtagatgtcagcttgaaaagcaggacagggtttccgtgggagcagcagggcagcaaggagaagtgtgtctcccagggggaagtctcaggattgctgccacaggtgaggtggatgggaaagaggagaatgactttcactgggcaagggagagaggctcccgctctgagactcccctgagaagaggctgaaggaggccctgggtgtgagaatctacaggatgtagagctggcaaaaagccagaatgccctcccagcagacacagagggaccactgcagagtcataaaggaattcccatcatttcctcatgagacagtcacatcagggtgtgactatggcctaggtatccccctctatggatggagacacttaggtttagaaaagtcagcaagagacattaagtttcagagggcacagctgaagccgctttctttgattttttattgtgatttattgatttatttatttatttattgagatggagtctcgctctgtgggccgggctggaatgcagtggcatgatctcagctcactgcaacctcggcctcccgagttcaagcgattctcctgtctcagtcccctgagtagctgggattacaggcgtgtgctaccacgcctggctaatttttgtatttttagt[132 bp omitted]cggctggagtgcagtggtgccatcatagctcactgcagcctcaaagtcctgagttcaagcaatcctcttaactcagcctgccaacatgctgggatctcagacgtgagccaccgcacttggcccaaaaccaagctttcttatcccaattgccaacctaatcctaatcttctatcatctcctaagtgtccctcatgagtgatcacttctgagtcctcccgcatggagagctcacccactgggggcatatttttcccattggaaaagtgtggttattggaagtttcctcttttttaaaagaacaggattggaggtgctctctggggtgtcctcctaccaagcagcctgttgaaagtctcgtggtgctcagggagcacgggtgacactcgccattgcttcagcttcatcttgagcccacacagcgtctccgccacccaggtctcctcaggctcaggggcgagctccttctctggctcctcctccgatgactcctcagattcgtccgaccactccctcttccttttccagcaaagggacccacacagggggctgggatctaccccaggggctgagtaaagaaaccaggccactgtataatgcttctgcaattgaactccttagagccagacccaaaacgccaaaccactctccatcctccccagcctcgcagactgctggcttctccaagccatctttccgtctttctcctttgctgaaccccatgagccgctccttcccctccccattcttccatctctctgtcctcagaacacttcctcatttccttccctcatccctagttctctgagtctctcctttttttttttttttttttttgacacagagtcttgctttgtcgcccaggctggagtgtagtagtgcaatctcggctcactgcaatctccgtctcccaggttccagtgattctcctgcctcagcctcccaagtagctgggattacaggtgcccgtaataacgcccagctcatttttgttcttttagtagggatggggtttcaccatgttggccaggctggtctcaaactcctggcctcaagtgatccgcctgccttggcctcccgaagtgctgggattacaggtgtgagccactgcaccctgcctcagtccctccattcttcccacacacctcctcaggtgctccttcctgacttctgggcccgtccttgtttttttttttttgttttttttgttttttttgccacagggtctcagtctctcagactggagtgcagtggtgctatctcggctcaaagcaacctctgcctcccgggttctagagattctcctgtctcagcctcccaagtagctgggaatacaggcgtgcgccaccacacccggctaagttttgtatttttagtattgactaggtttcactatattggtcaggctggtctcgaacaactgacctcaggtgatccacccgcctcagcctcccaaagtgctgggattacagacatgagctactgcgcccggcctttggttttcttttgaaacagggttttgttctgtcatgcaggctggagtgcagtcgtgcagtcatagctcactgcagcctcaaagtcctgagttcaagcaattctcttgcctcagcctcccagtgtgctgggatctcaggcatcagccacagcacctgtcccgaaaccaaactttctttttttgttgtttttttgtttttttgagacagagtctctctctgtcacccaggctggagtgtagtggcgcgatctcagctcactgcaagcaacacctccggggttcacgccattctgctgcctcagcctcccaagtagctaggactacaggcgcccacca[133 bp omitted]cagcgcccagcccaaaaccaagctttcttatcccgagagccaaactttatcaactccagcctaatcctctatcatctcctaagcgtccctcatgagtgatcacttctgagtcctcccgcatggagagctcacccactgggggcatatttttcccattggaaaagtgtggttattgaaagttttcctcgtttttaaaagaacaggattggaggtgctctctggggtgtcctcctaccaagcagcctgttgaagtcctcatggtgctcagggagcacgaatgacactagccgttgcttcagcttcagcttcattttgagcccacacagcatctccgccacccaggtctcctcaggctcaggggcgagctccttctctggcgcctcctccgatgactcctcagattggtccgaccactccctcttccttttccagcaaagggacctacatgggaggctgggatctaccccaggggctgagtaaagaaaccaggccaccatgtaatgcttctgcaactgatcaccttagaccccgaccccgaccccaaccccaaaccactctccatcctccccagccttgcagactgttggcttctccaagccatctttctggctttctcctctgctcaaccccatgagccgctccttcccctccccattcttccgtatctctgtcctcagaacacttcttcatgtccttccctggtccctggctctctgagtccctccttttttgcttgtttttttgttattggttttttttttttttgtttcgagacagaatcttgctttgtcgcccgggctggagtgtagtggtgcaatctcagttcactgcaacatctgtctcccggattccagttattctcatgcctcagcctctcaggtagctgggattacaggtatctgccataatgcccagctcaattttgtacttttagtagagatggggtttcaccatgttgaccaggctggtctcaaactcctggcctcaagtgatctgcccgccttggcctcccaaagtgctgggattacaggtgtgagccactgcacctggcctgaatttctccattcttcccatacaccctcctcaggttctccttcctgacctctgacccttcttttttttttttttttttttgagacagtgtctcactctctcacccagactggagtgcggtagcacaatcttggctcactgcaacctcttcctcccaggctcaagtgattctcctgtctcagcctcccaaatagctgggattacaggcgcgcaccactaccacctggctaatttttgtacttttagtagagatggggtttcaccatgttggccaggctcgtcttgaactcctgacctcaggtgatccatccgcctcggcctcccaaagtgttagggttacaggtgtgagccactgcacctggcccccttccttcaccttagtcaatcctatcccacctcttcttcctccagtcccctcacctgatggtcccgacacttcatcatccaccacctcctggagggggtaccctgaggtgctcagctgggggctctgctcctcatcctgggggtgcggttgatggctggtcatgatctttcccaaaatctatcccaacccacggaacctagtctctgttctatccaaggccttcttctggactctgctaggacccagaaggtgtgttatcaattctcgaggctgagagaagtcaggagtggagaacagctctgagaagatgcagttgtccacttgagctcccagatgcccatggagtccagtccttccaatcaggaaggttggaatctctgatgtcattggtcattccaacctggcaaccagtttgaagaaaaacacatgtaactgccaggctggtctcttgtcctggagatcctgggtgaatggtatctcctgccactgtcccaacctcagaccaccatccaaaagcatcttcagggtctccgcatccatctgttccctgtcccagcagaggctgtgtcttctccactcaaagcctgaagcattttggggtctcctcttctctgtacatgcccatttcagagtccagtctggtgggagagggagggtgggaaagaaaactagggtaagcagaaactatgaaaccttacaagtgtgagattatcatatacaagagatcccaggaacattgacttgatgaaaaagtcacatcagagcactcaatttggcagagcttttctgccgaatgtttactgacattcactgtccgagattctatactgggggtacacgtgtcctctgccgtaaggcatctttgagtccaagagacattttgaggcctgaaaatcataggaaactgcccatgagctcactcatatttccaatggtgtccccagtttcagggagtccatggattacctaaggccagcccctccagttcggctaagaaactctagtctatatattaagttttgtatcatatgtattgctctgaactcagaaatttccctaccatttatggattctatgaataaaatatcgcatgtacaaaaagactaagtcgaaaaatctcagctgtgcacagtggctcatgtttgtaatcccagcactttgggtggccaagggaggaagattgcctgaggccagcagttcaagaccagtgtaggcaacatagcatgaccccatctctaaaaaaacaaaaccaaaccaaattagccaggtgtggtggctggcaccttgttccaactacttgggagactcatgcgacaggaagatcgcttgagcccaggacttagaagctgcagtgagctatgatcttgccaccgcactccagtctaggcaacacagcaagacgttgtgtcaaaaaaaatttttttgataaaaaataaaagagttgg[223 bp omitted]ggactggagaatcacttgaactcggggtgcggaggttgccgtgagccaagatcgcaccattgctctccagcctgggcaacaagagcaaaactccgtctcaaaaaaataaacaaagaacctgtgagtgagttcccatatggcttcctaatgggctgtggctctcctaggagtctcttgctcatgggaaaggcccaaactgaatgaggaagcagatcccattgctatggaagtcccattggtaggaagctctgcttttctggagttcaaatttccattcatgacgctttaaaccgccagagctgggtgggtcctgacaaaacagtttgctatctctctcctagttaacaggctttcatatattagaagatcaatgttctgaccccattaaaagttctcttttgtggaatgaaaagctctgatttaacccatcttcaaacctggtttgcatattcttctctcttctggcacaccaccatgcctgattaagttttttttttttttttttttttttttggcagggacagggttttgccatgttgccgaggctagtcttgaactcctggtctcaagcaatctcctcacctcagcctcccaaagtgctagcagtagaggcatgagccaccacaccaggccaaggctattattctgacttaggggttttttatttgtttcattttgtttttcctacagagtcggtatttcttcaatagatatatctcaaagcagaagctggctaacatcatcctggaacttcaattttcctaacatcagagatgcaataaaactttggacaaatagagtatggtctatatacagctggtgccagaactgcataacccaggtatggatgtgacatccctgttttcagtgctatagtttttctacacacttggtgtttatatacatatgtgctcaagtcagtccaaccctcaagctaaacttagataagatgaaattattgagtcaagtctgcctttgcttctataaaaacatacatcaagtcactttctggttcctgttttcttgtccttatcatattactcataggactcagaattgtttattattaatttcagagtttagaagtattgaaagacaccatctttccatctcgtatctgccaccgagaactttacagtgtaaaacaacagttttgcattttggaaagtaaattatgcaagctccaggaagcactgaaggttggtattgtcaaataaaaagcaaatctggaattaggtaaggagacactttttttgaaaagactattgcaatagggaaaatgctcaagtcataagatttatatctcaaacattaagcgaaaaagttttctttgttagcaaggaatacaaagggtagaacaaactgggttatggggaagtaagatgaagagctgggataatctgatcagatagctgattggatcagggaacatcttttcctgaaggttcttcagcataccaatgcttgcttaagcccaagaataggtcaaggttctagggcctatggggagggctaaatcctgactaaagtttggtcaagttagtagatatattgtccagattggtcagtggcagtgaacagttcagctaatcacttatgagacaaagaatgggaatttggagggtctgtgtctggctttgtcagataaatgagggagccatccataaaacttatctaactgatgtggaaaaagttggttccacatcacttccaaaataaaaaattatttcctggacataaaactgtgggaagatttttgtttgtttgtttgtttctagagatgggatctcactatgttgcccagcctagactccaactcctaactcctgggctcaagtgatcctcctacctcagcctcccttagtagctgggactacaggcttgcactattgcacccacctaggatggggagattttttggccatccttattttccagaatcacagagctcaggtgaagttcaatattgtcagtattaaagcagaagatctgaaaaaaattttgccagctgtttgtaatttttttttttttttttttttttttttttttttagacagaatctcactctgttacacaggctagagtgcagtggcatgatcatggctcactgcaaccttgacctactggctcaagggatcctcctgcctcagcctcccttgtagctgggaccagaggtgtgtgccacctgcccggcaaattttttagttttttatagggatgggggtctcactttgttgcccaggctagtctcaaactcctggcctcaagtgatcctcctacctcagcctcccaaagtgttgggattgcaggcgtgagccatggcacctggcttgtttgtacatttttaaatagcaagtcagacataaaaataaatttatgcacagcaaaataagatgcaaaaatatttgctcaaatatcaggaaaaggattaattattgaatatataaagaaccactacaaatcaatacaaaaaagaccaacaacttagcagtaaaatgaggaaataatatgaacacagcattcacctaaatacaggaatacaagccaggtacagtggtacacacttataatcccagctactcaagaaactgaaatggtagaatcacttgagcacagaagtttgaggccatcctgggcagaaagaaaaggaatacaaatggttcttaaatacatgagtagggccaggcacagtgactcatgcctataatcccagcagtttgggaggccaaaacaggcagatcatctgagatcaggagaatcacttgaacccggaaagtggagactgctgtgagccgagatcgtgctgctgcactccagcctgggtgacagagctagactgtctcaaaaataaaataaaataaaaataaaataaaataaaataaataaatacatgagtaggtgctcaacttcacttaagagtgaatcaggggctgggcgcggtggcttacccctgtaatcccaccactttggaagactgaggagggtggatcacttgaggtcaggagttcaagactagcctagccaatgtgaaaccccctctctactaaaatacaaaaattagctgggcttgttagtgcatgcctgtaatcccagctactcggatggctgaggcaggtgaattgcttgaacccgggaggcagaggttgcagtgagctgagatcgcatcactgcactccagcttgggcaacagagcaagactccatctcaagagtgaatcagggctgagcgcagtggctcacgcttgtaatcccagcactttgggaggccgaggtgggcagatcacttgaggtcaggagtttgagaccagcctggccaacatggtgaaaccctgtctctactaaaaatacaaaagttagccaggtgtgatggcgggcaccagtaatcccagctactcaggaggctgaggcaggagaatcacttgaacccgggaggcggaggttgcagtgagccgagatcacgccactgcactccagccagggtgacagaatgagactccattaaaaaaaaaaaaaaaaagtgtgtcaagactaggtgtggtaccagtgacaaagcctcaaagaatatttgcataaacaaaatgtctttattttaggcagcaggaagaaagagaaaagttatcctactacccctattaaggcgacttcccaaactcatttacagaacttttacttacatctcatttcgctaaaacatagtcatgtaattatacctagcaactagggaacctgaggaatgtaatctatcatctggattacagtgtgtccggctaaaagtcaggtttcctattactaaagaagaaggcaaaaatgtatattgggaggcaattagtagtctctgccacacacaaaaaacagaaatgcaaaataaacttcaatgagtaatgcctttagcctatcagattgacagaacaaacaaatcaaagaccaaaagttttggagaaacaggtgctctcttgttattgagaatggcctaaattgataaaacctctgtgggctataattaattaacatctatcaaaatttttaaaatatatatcttttgatgcaaccaaattttgtacatatgtacaaagttatttattgcggtgtgatttgaaaaatagcgaaaacttacaaagaaaactgtcaaagaatatgggattaatttaatacattataatccattcattcaatttaatactatgtagccgttaagaagaatgaggtagttctgtatgtactaatgaggtatgatctcaagaacacaccatcagtccccctcccccaggaaaacttttttaaagaatacactaatggccaggcgtggtggctcacacctgtaatcccagcactttgcaaggccaaagtggatggatcacttgaggccaggggtttgagaccagcctggccaacatggcaaaaccccatctctactaaaaatacaaaaaattagcctggcatggtgacatgcttctgtaatcccagctactcaagaggctgaggcaggagaatcactggaacctgggagacacaggttgcagtgagctgagatcgcgccacagcactccagcctgggcaacagagcatgactgtgtctcaaaaataataataataataataataataataataatacattattaaattaagtgtaaaggtatattcagaacagtgtttataggatgttcccatgtattattaaaatgtataactttgggaggccaaggtggttggatcacttgaggtcaggagttcgagaccatcctagccaacatgatgaaaccccctctctactaaaaaacacaaaaattagctgggcgtggtggcgcatgtccatagtcccagctactcaggaggttgaggcaggagaatcatttgaacccaggaggcagaggttgcagtgagttgtgatcgtgccactgcactcaaatctgggtgacaaagcgagactgtctcaaaaaatattatttgagacaaaaaaaaaaatagaataattttttttgttcgtttgagacaaagtaccgctctgtcgcccaggctaaagtgtagtggcgtgatctcagctcactgcaacctccgccttctgggttcaagcagttcttctgcctcaacctcccaagtagctgggactacaggtgcccgccaccatgcctggctaatttttgtatttttagtagagacaggatctcaccatgttgcccaggctggtcttgaactcctgacctcaagtgatctgcctgcctcggcctcccaaagtgctgggattctagacatgagccaccacaccaggcctaaataaaattattgagactaggtgggactccaaaaataaatagcaaaaaaattaaattaaacataaaataaaactaattgaccagttgagattttggttctggaagtaaattcattgcttttttgaattcctataattttgtaactttgtcagagaagtttgctgtgggtgacaaggcagtattcaaacagaccttaaaaattaaattttttagctggtcatggcatacacacctatagtcccaatttctcaggggactgaggtgggaagattccttgagcctcaggacactccagcccactgcattctagcctgggcaacatagtgagaccctgtctctaaaaaaaaaaagttttcttttattttaaaaagtctagaatgaatgtgtgtgtgtatgtgtgaaataattctataaaccttcccttctctccttcacctctagtgtacacactctacctttcatgacttttctcctatttcagctctccttatattttaaccccaaatcactaat[139 bp omitted]ggtgaaaccccgtccctactaaaaatacaaaaaaattagctgggcgtgttgtcacacacctgtaatcccagctattcgggaggctgaggcaggagaatcacttgaacccaggaggtggaggttgcagtgagccaagatcacgccactgcactccagccctctagcctgggcgacacagcaagactccatctcaaaaaaaaaaaaagaaaaaagaattaagaatgaagcttatgttatttccttcactaagaaagcacctagaaggctgtatcagtcaaaattctttttagccacaagtggcagaaacacagggcaatccggcttaagcccataaaaccagtaagtctagggtatggctggattcagaggctcaaatgatattgtcaacattctggctctgtctcatctttcagttctgccttctttacagtaagtttatttctcagacagactctccctttgcactagcaacatggctgctggcagccttagattcttattctcataacagaaccatctcagccaagagaacttggcctgggttatgtgtctagtccttgagtgagtatcctgaccagatcacgtggactgagggaatgaagggaaacccaggtgcttttataccagaaggaggaatggctacaggtgagggctagtccctgggcctgtttgccccacttcagaagctctgctctgtattgctgggagggctggctcctacaggatacattcctcaagctccaggtcacctggttcctggttatgatggcctattgcgagacactgatgagagactagagggagggagaaggcaaggagtttcctcccctcctctttactgcatgatttctccagcaatggtagttgttgccttcctggccccatctcccactggataaatactccatgtttctttctttttttctttttttcttttttttttttttttgagacagaatttcactctgtcacccaggctggagtgcagtggcgcaatctcagctcactgcagcctccacctcccgggttcaagcgattctcctgcctcagcctcccaagtagctgggattacaggtgcccaccaccacgcctcgctaatttttgtgtttttagtagagatgaggtttcactgtgttgtttaggctggtctcaaactcctgacctcaggtaatccacctgcctcagcctcccaaggtgctgggattatagacgtgagccaccgcacccagctaatgtttcttgattctctgggtaaacctacctccagacctctggatataccacctccaccttttgtttctccagcctcaggaagttaatgccttcctgctgttgctaatctctagattgcctcatggtacccagtaggcctctcagctcttccattataaatgtaaccaagtgcctgtattacattacccctcttttcaatatccagagtggtttctattttcctgactgatatatgcaggaaaatatccactccaaactcccctaagcaaggcccctatgtctcaacattgtgctcattggtctggagagaagcttctggaattccatccctgctcccagaatttgtgcctcaggatgaattagccaaaggagaaaaaggcaagtcatttaactcctctgggcctcagtttcctcctctataaatttgggatgataccatttgtgggagactgaatacatggcagcctccaaaaggtatattcaagtcctaatccccagaacctgtaaatactgccttatttggacaaagggctttacaaatgtaattagggtaaggattttgagatgaggagatcttcctggattatctaggtggaccctaagtcccaggacaagtgcccttatgagagagacacacagagaatgcatacagagaagagaagcaatgtgaccacagagatagagattggagtgatgcagccacaaaccaaggagtgctgacagctactagaagccaaaagaggcaaggaaccgattcttccccagaggtatgggaggcagtgaagctcctacgacaccttgatgacagacttttcgcctcaagcactgtgcgaaaataagcttcaattgttttcaaccaccaagtttgggataatttgttacagcaggcacaggaaattaatacaccgttttacttcatagggtcgttgtatttgtttgctagagctgccataacaaaataccacaggctgggtggcttatacaacagaaatttactttctcacagtctggaagcaagaagtctgtggcttcttggttagtttcttctgaggctccctcctgggcttgtagatggctgtcttcgctctatgtcttcacacagtcttcctctgtgtgagtacattcctgatatctctctgcatgtccaatttcctcttactgtaagaacaccagttagaatggattaggacccccaccctaacggcctcattttaacttaatcacctctttaaagaccctatctccaaatatagtcacattctgatgttctggatgttaagacttcaacatatgaattctgggacacaattcagtccacagtagtcatgttccagatcctttgctttatcagtttcttgaaagtactatattcttggctgtattaagtatttttttcctctgcaaggaactcttcccctagtccttatctcccttcgtctgctaagtctcaatttattcttgagatcatggctaaatatcacttcccaagcctccagctgttcatgctcatagcacacttcgttgctcttattgaagtattgttttgtttcaagtgtgtttgtgcatgtttgtttgagatgagatctcactatgttgtccaggctggtctcgaactcctgggctcaagcaattcgctggattcagccttccaaagtgctgggattacaggtgtgcaccaccattcctggccttctgtgcatgtttaatgtctgtcttctgtcaccgaactgtcagctccatgaggtgacacacagggctcacattgtacctatagtgcctggcatatagcacatacaaaataaactaatgaatgaaatgaagaaacttatgattataaatgagaaaatatcaggaagcacatggtacgctgagaaagcattcaatacatggtagctattattttgatgactctcaccctcaagaatcaaattaacttgttatttatttgccaaatgtgatgtcttcttccagaccatctcagaaagttcttcctgtccaagctgtggtcaaacatgtcacatgagtggtaaacttacaaatgtgcctgcctgcgttctgatcacccctggagactccaaagctgtgcttcctcccacactgccacagccagccagccattttcctcctcctcctccacctccacctctgccacctcctccaccaccactagcacctgtgttgctcagaaaacccagtctcgctaaagcacttcaggtaggtaacaatctagtaatgatatgttttgatatgttttggtgagtgtgtaatataggagtaaagccaagtggccttttaaggccaggctaatcagggcttgggccagaaggctatattttgttctgattccgtatcttaattattgtgtttttaaaatctcagttcctgagaaattcctagaagctggattgagaaatgaaagtgatgtgtgtgaaacccagtagagtggaagatttctattcgcttctcagcatggctttttcctagggaagaaaacctccctaggaaaccaaatttagaatagaagattgcttagagagtaaagtcagaacaaagagttagtggattccaaagtttcatatcattaggctggagaaccaatctctatttcagttacttatttaccaaggggaccagacaatttgtgaatcactaagacaggcatgaccctgttttaaaatctgctgaattttcactatggataatttggtttaatgtagctgaattaaatccagagtcttcccaatcctcacacacacacacacacacacacacacacacacacacaaaacaaaacctggagcctattgttatatttgccctaattatacctctctgattgtatacattcttgttctgtggaaactgagtcatctttctaggtaattcaagcaaaacttcactttaacccgattaactccttcaactcttgtcttattataatgactcccggggaagatgcaatattgcaggaaactagtccatctcttatttgttagcaaagtcttagcttataaaaacaaaattgcggggtgggggaagccttacattttgatgaatgcttttcaatgggtgataaaaatacgattattcttggttgagtagaaagaatatgacaggttcctagggtagataagagttacctcttaactctgagtctttaaaaactagatttggatttgcatttcaccagttgtgctggttccaatttgaattctaaccttaccatgtattttaaggctggaccattaaaaaaagatggacccatgcagataacagttaaagatctgctgactgtaaaattaaagaagacacagagtttagatgaaaagaggaaggtaagatgtcattgaccacatacatgctctttttgcttttaacaatataggctcatgcctataatcccagcactttgggagaccaaggtgggaggatcacctgagcccaggagttcaggaccagcatggggaatatggcaagacctcatctcaatttgtatacaattggggtcgggggtgctggagggagaagtcatttcatttcaagttaagtttttgatgtttttattttagtagttttggatttcccaacaaaatgtatatattaggaaatgatttaattaggcaattttatctcccaacccttagtctgaagaggtagagacatcctttgaagctctggaataaaaattgggtagcatactggatatatcttacacaaactcagcactcagatatttgccgtttttgcatgtttacattttgagtgatattttaaaatttgttttaataatgtctcattttataattaaagcttataccatcgccgaaagcacggaatccactagttaccgtctctgacttgcagcatgttaccctgaaacctaactccaaagtgttatcgactcgagttacaaacgtcttaatgtaaggaactgcacagtactatgctctactactacttaaaagaatgatattgttgtacaaaggcctaaagaaaaggaaaaaaagattttttgtgtgtatttctaatgttaaaagttatatatgctcattatagaaaaactgaaatctacagaaaagtttaaaaaagaaaacaaaaattatctaaataatcctatcactggagatagccactgttaacatactgctgtttatcattctagtctttttctgggcatatggtttattgccccatttaaagatgctgtttattataagatatggcattgatttaataacagattttgggagaaaaagatatactatcaagaattttaggctgggagtggtgggttatgtctgtaatcccaccactttgggaagctgaagtaggaggattgcttgaggccgggagtttaagaccagcctgggcaacatagtgagagccccatctctaaaaaaaactaattaaattaaaaattagccggatgcagtggtgtgtgcctgtagtcccagctacttgggaggctgaagaaagaggatcacttgagcccaggagatcaaggctgcagtaagaagtgattgtgccactgtactccagcctggacaacagagagagactccatctcaaaaaaaaaaaaaaaaaaaaaatcataacctaaatgtcttaaaacaggattttatctatgaaatttacatacaattaactgcatattttgaagatgtcaaaatgacactttaagttaattttcaaaaagataggaagagttcatgatatactgaatgggaaaaactatatctacaatatgattatacacagacagatacacacatataccatatttgcttgattccaagacacactagttttcatattatataatttctgaaagcaacctgttttatttatttattttttgtatttttttattttttgagatggagtcttgctctgtcgcccagactggagtgcagtgatgcaatatcggctcacagcaacctccacctcccgggttccagcaattctcctgcttcagcctcctgagtagcagggattacaggcgtgtgccacagtgctggctaatttttgtatgttttaatagagacggggtttcactatgttggccagggtggtctcaaactcctgacctcaaatgacccacccccctcggcctcctaaagtgctgggatttcaggggtgagccactgcgcctgacttaggttatgacatttaatttctgtaagtcttcagtggacatccttgcctatcaactctgtacatggctgagtttttccctaggatggattcttacacatgtaactcctgggtcaagaagtattacatattggaatggctatatcatcttatgttcccatcggcatctactgctattttttttctttttttctttttttgagaaggagctctgtcacccaggctggagtagtggcacaagctcggctcactacaacctccgcctcccaggttcaagcaattctctgcctcagcctcccgagtagctgggattacaggcacccgccaccacgcccagctaattttcgtatttttagtagagatggggtttcaccatcttggccaggctggtcatgaactcctgacctcgtgatccatctgcctcggcctcctaaagtgctgggatcacaggcgtgagccaccgcaccctgcttctactgctattttttaatgtaacacatagaactactttctaggatgttgcctatagaaatgattgctttcctttgggaaaaaaataataaaatctggcaagttctaattttttttttttttggagacagagtcttgctctattgcccaggctggagtgcagtggtgcaatctttgctcactgcaagctctgccttccgggttcacgccattcttctgcctcagcctcccgagtagctgggactacaggcgcccaccaccacacctggctaattttttgtatttttaatagagacaaggtttcaccgtgttagcaaggatggtcttgatctcctgaccttgtgatccacctgcctcagcctcccaaagttctaatttttatatctttgttttatcagcactcctggaaaaagtcagatggatctgcggaaactgcttagaaaagtcgatgtagagaggtaatacactctcatatctttatgccttctacgtccattttaaaagttgccataaaatacagctactgttattttcaatacctttgcaggagcccaggtggaacccctcttaccaataaggaaaatatggaaacaggaacaggactgactccagtgatgacgcaggccttaaggagaaagtttcaggtaaccctttaggaaaagaatattggttcctttgcttgaaaataatttggcctggtgtggtggctcatgactgtaatcctaacactttgggaggctgaggtggggagattgcttgagcctagcagttcaagatgggcaacatggtgaaactctgtctctacaaaaaatacaaaaaattagccaggcgtggtggtgcatgcctgtagttccagctacttgggaagctgtgttggaggatcacttgagcccaggaggtcaaggctgcagtgagctgtgattgcaccactgcactccagtctgggtgacaaagcaagaccctgtctcaaataaataatcataatcataatttatgatcataatttaaagcagctttcttagtaacaataatttttaaatggtaccgtattttgcaaagtattttcatatttaggcttcataaaattctataaaatacaggtaggattggccgggcacagtgagtggctcatgcctgtaatctcagcactttgggaggccgaggtgggcagatcacatgaggccaggagtttgagaccagcgtggcc[133 bp omitted]caacatggtgaaaccccgtctctaccccaaatacaaaaattagcaaggtgtggtggcggatgcctgtagtcccagctactcgggaggctgaggcaggagaatcacttgaacctgggaggcagaggttgcagtgagccaagattgtgccactgaactccagcctgggtgacagagcgagacttagtctcaaaaaaaaaaaaaattagccatgtatggtgactcgtgcctgtaatcccggctacttgggtggctaaggcatgagaatcgcttgaacccaggagacggaggttgcagtgagccaagactgcaccactgcactccagcctgggtgacggagtgagaccctgtctcaaaaaaagaaaaaaaagaactataggtaggattatcatgtctatctgtaaatgtctgattttattaatccctttagtacatatttttagtaaatatttactaagcacttcctatatgcccagcagtgtgttgaagtactgggaatatagtggtaagcaaaaacagatacagattactgtcttgaagctttcagtctagtggggaaaataggcattcatcaaataatcccatatttgtataatatcacatggcagtatgtgctatgaaggaaaggaatgaggttctgtgggaacccagagaggaacttgatctagcctggatgatctaggagggactcccttaggaagtgatgatgcttgaggtgagagtcgaagaaggaagaggcatttactggatagggtaactgtggggtgggtccaccatgagtgtcaggaaggagagagttccaggcaaaaagaacaaaattcgtaagagttccatggggtgagggatcatggcctattcaaggaactaagaagtgaccagtgtggctgtaacacagagagggagcccaatggtggtgaaagacagggatggagatgtagttaggagtcagaccctgcagagttgaaaggaaaaggtcttgagagctttctttgtcacattcatatacaaccacatacccaacccagtagatcagctggccctggtgtgacttcttccaaaccctgttgatcttagtcatctccctaattgcctctatcattagatctgtgaagaacagccatccgtcggctgcccctgctggagtgctggaacacagggctgctggcatctttggctttgaagtttatagttcgttctctctctggatgcagggacatagcagactccactgctgacactttccaccccaatattgtcttccttttgttccgtgtttgagaatcagtgctttttgtgggacaatataatttctctcttaccaatcaacttggtcctactgggcactatacagctttctgcgtagtggagatgtgaccaggttcttctttcctcctcttagagcatgctacccctaatcaagttccttggtgatacccaaaattgtgaagggcaggagcaaagggacgaggcctcacgggtcttagccccttgctttttctgtttagctctaagatctttgttgtcactgcccctacttcatagcaggtacagtgagttgagaactctggaaatggataaacgataataaattgtaaagccacatattgaacaacaacaaaaatcacagataagacctatggcatatgttgtgctgccaaaatctactcaggaggaggatgtctagttaaaattgttgttagatatagatgacttatcccacccaacccttaggcttctttttttcttaaactgtgaagcaactgtatcaggttttgcattggcttcaggtatcagaaatctgactatagtggtttaatcaaatagggacatggcagagtgtagtggctcatacctgtaatcccagtgctttgggaggctaaggccggaaagtcgcttgaggccaggagtttgaaaccatcctgggcgatatagcaagactctgccttgacaaataaataaataaattaggacttttttttttaatatatacaactaactcatttattttattttattttaattttttttgagacggagtctcgctctgtcgcccaggctggagtacaatggcgcaatcttggctcgctgcaagctctgcctcctgggttcacaccattctcctgcctcagcctcccgaatagctgggactacaggcgcccgccaccacgcccggctaattttttgtatttttagtagagacagggtt[277 bp omitted]atacgtttttggggaacagaaagtgtttggttacacaaattagttctttagtggtgatttctgagattttggcacacccatcacccagccagtgtacactgttcccaatgtatagtcttttatccctcaccccaccccaccctttcccccaagtccccaaagtccactgtatcattcttatgcctttgcatcctcatagcttagctcccggacttatttttttaatttaaatatttctttgggcagtaggaagtccacaactataatacagtggcttcaccatataatcactgttcttccatccttaatgtgtggcttttatcctcttaatacaaaatgcctacatttcctgaagcctcatgtccacattctaggcaagagaaggagaaaggcaaatgttaattaagctatgcctcatttcttcaaagaagccctatccaggaacttctgattgcatcagggaaactgggaaaagtggtttttacaatctgaatgcagtgttgccatgcaaaaattctgggttctgttgagaaaggagagttgtacttatcacaggaatataattgatattataattgggactttttttttttatagctggctcaccctagaagcccaactccaactctgccactttctacaagcagctttgatgaacaaaactgatgccaactctgcctcactccatgagatgatccataacaaatacagataaaaacacccagctgggtgcagtggctcacacctgtaatcccagcactttgggaggctgaggcaggtggatcacctgaggtcaggagtttgagaccagcctggccaacatggtgaaactccttccccactaaaaatacagaaattagctgggcatagtggcgggtgcctgtaatcccagctatgcgggaggctaaggcaggagaattgcttgaacccaagaggcagaggttgcagtgagccaagatcgcgtcattgcactccagcctgagcaacaagagcaaaacaaaaacaaacaaacaaacaaaaaaaacccacccaaatccttttttttaatgtagtagggtttatatagatatactaatataattgcatttggagaattagagtatgtatggagcccacacatactgtgatataaagtgtatatacagatatttggatattttctagtttgcatgatgattaagagaaccagatgggaaaatacaatctccaaagtgatgtttatcctggaattacccaatttagattagagaggttgttcaaatttaactagataactctagtttgtactgtataggtgcagttatgacagtaaaaaaatagcctcttggctcatacctgtaatcccaccactttgggaggccaaggtgggaggattgcttgagcccaggaattcaagactagcctgggcaacataatacagggagaccccgtttctattaaaaatacaaaaatcagccagctgtggtgacacatgcctatagtcccagctacttaggaagctgagaagggaggatcacttgaggctgtagtgcactataattatgcctgtgaatagccactctactccagcctgggcaacatagcaagaccccatctctaaaaattaaaaaaaaaatttaaattagaatatcatttctagcatcttaggtaggtacttatatctggcttacagaagtctaaggtattccttatttttatatctgctgtccacatttatacagctacataaaaattttatgacaacttcaacatgaaccttatattttcgacaatgccttgccaaggaatctctgaagtccatagcaggtcactgtgagacctagttccctgttgtcactgacctatgtaatcaaagacagtaatacagcctgggaaacatagcgagaccctgtctctatcaaaaatttaaaattacccaggcatggtgacgcacacctgtagtctaagtgtccaagttacttgtgaagctgaggtgggaggatcacttgagcccaagagtttgaagctatggtgagctatgattgttccactatactccagcattggcaacagagcaagaactcatctctaaaaagtaaaaagcaactccccagaaagactgtatttctacagataaatattgcattgagatgccaaatagagtgttgttgtaaagtcatcagactagaaagcagacctggggacagtgtttaccacctaagaggcagtcctgtttttgagacccacatctatatatagagatttttgtttgtttgtttgtttgttttgttttgttttgagatgaagtctcactctgtcacccaggctggagtgcagtggcgcaatcttggctcactgcaacctccacctcccaggttcaagcaattctcctgcctcagcctcctgagtagctgggattacaggtgcgcactgccacgcctgactaatttttgtatttctagtaaagatggggtttcactatgttggccaggctggtcttgaactcctcacctcaggtgatccacccatctcagcctcccaaagtgctgagattacaggcgtgagccaccacgcccggccagagatccacatctatatttataacacatttatggatgaaaattaaacaggtgtccgggtgcggttactcatgcctgtaatccgagcacttgtggaggccgaggcaggcggattacttgaggtcaggacttcgaaaccagcctggccaacatggtgaaatcccatctctactaaaaatacaaaattagccaggtgtggtgtcacgcacctgtagtcccagttacttgaacctgggaggcagaggttgcagtgagccgagattgcaacactgccactccagcctgggtgacagagcaagagaccctgtctcaaaaaaaaaaaaaaaaaattaaatgggtagtgacgttaagagatatatatcagcttctagtaaaagtttttttttttaaacctgctagctacatttacattatgtaaaaataaagggaataatcactgagaataaagcagttgagtatttataacaataatattttatggggcgcttataatgtttataatattgtaaaccactgtgtactctattcatttaatgctaaatgacttgaccattcttgtgggataagagatcattaaaaaaatgctagggccgggcaccatggctcacgcctgtaatcccaggactttaggaggccaaggcaggtggatgacttgagctcaggagtttgagaccagcctgggcaacatgatgaaaactccgtctctaccaaaaatcaaaaaaattagccaggtgtgatgttgtgtgcctgtagtcccagctacttgtgaggctgaggtgggaggatggtttgggccccggaggtagaggttgcagtgagctgagattgtgccactgtattccatcctgggcaacaga[136 bp omitted]catggtgaaaccccgtctctaccaaaaataaaaataaaaattatccaggcgtggtggcatgtgcctatagccccagctactcaggaagctaaagcacgagaattatgtgcatcctggaggtgaaggttgcagtgagccaagatcacaccactccactccagtctggacaacagagtgagaccctgtgtcaaaaaaaaaaaaaagaaagaaagaaagaaaaaatgctttatggcccagtgcagtggctcacacctataatcctagcactttgggaggctaaggcaggaggattgcttgaggccaagagttcaaaacaagcctgggcaacattgcaagaccccaactctacaaaaaacgaaaaattagccgggagcggtgatgtgtgcctgtagtcccagctactcaggagactgaggtgggagaatcacttgagcctgggaggttgaggctgcagtgagctgtgtttataccactgcactccagcctgctgggtaacagagcaagactccatctcaaaaagaaaagaaaaaatgctttgctacataatgaggccaggcaaaaaaaaaaaagtcctgtggaaatcatatagacaaacatttgcaaagctgctactgccattgtaccagtgttaaactgtgttctaccttgcatcttttactgatttttatgacagattttatattgtaaccattcgagaactctgtaagtgctatggcttccttaaactacgatttatcatatgctcccggtgtttactttgagactgaatggcaaccagagaatgtaaacaaccaaggtgcatctggttatgttttaaaataaagattaataaaagttttggtttttctctttctaaccttctttttaaactagaaatataatacctatagaaaagtaaatgttggccgggtgcggtggctcatgcctataatcccagcactttgggaggccgaggcaggcagatcacctgaggtcaagagttcgagaccagtctggccaacatggtgaaaccctgtctctactaaaaatacaaaaattagccgggcatagtggcagacacctgtaatcccagctactgggaaggctgagccagaatggcttgaacctgggaggcagaggttgcagtgagccgagatcgccccattgcactccagcttgagcaacaagagcgaaactgtctcaaaaaaaaaaaaaaagtatatgttaagtatagaaaaa[131 bp omitted]tgaaaccccgtctctaccaaaaaaaatatataaaaattatctgggtgtggtggcatgtgcctatagtctcagcttctcagaagactgaggcgtgagaatcacttgaacgatggaagtggaggttgcagtgagctgagatcacactactgcactacagtctgggcaacagagtgagaccttgtctcaaaaaaaaaagaaagaaaaagaaaaatgctttatggcccagtgcagtggctcacacctataatcctagcactttgggaggctaaggcaggaggttcgcttgaggccaagagttcaaaacaagcctgggcaacactgcaagaccccaactctacaaaaaacgaaaaattagccgggagcggtgatgtgtgcctgtagtcccagctactcaggagactgaggtggaagaatcacttgagcccgggaggttgaggctgcagtgagctgtgtttataccactgcactccagcctgctgggtaacagagcaagactccatctcaaaaagaaaagaaaaaatgctttgctacataatgaggccaggcaaaaaaaaaaagtcctgtggaaatcatatagacaaacatttgcaaagctgctactgccattgtaccagtgttaaaatgtgttctaccttgcatcttttactgatttttatgacagattttatattgtaaccatttgagaactctgtaagtgctatggcttccttaaactacgatttatcatatgctcccagtgtttactttgagactgaatggcaaccagagaatgtaaacaaccaaggtgcatctggttatgttttaaaataaagattaataaaagttttggtttttctctttctaaccttctttttaaactagaaatataatacctatagaaaagtaaatgttggccgggtgcggtggctcatgcctataatcccagcactttgggaggccgaggcaggcagatcacctgaggtcaagagttcgagaccagtctggccaacatggtgaaaccctgtctctactaaaaatacaaaaattagccgggcatagtggcagacacctgtaatcccagctactgggaaggctgagccagaatggcttgaacctgggaggcaaaggttgcagtgagccgagatcgccccattgtactccagcttgagcaacaagagcgaaactgtctcaaaaaaaaaaaaagtatatgttaagtatagaaaaatatataaattaaaaaattataggcttgggggccaggcacagtggctcacacctgtaatcccagcactttgggaggctgaggtgggaggatcacttgaggccaagagtttgaaaccagtatgggcaacattgcaagaccctgtctctacaaaaaacaaaaaattagccgggcatggtggcatgtgcctgtagtcccagctactcgggagactgaggtgggagaatcacttgagtccaggaggttgaggctccagcgagcagtgttcataccacctgcactccagcctgctgggtgacagagcaagatgctgtctcaaaaaaaaaaaaaaaaaaaaaagaaagaaaaaagaaaaatgctttgctatataacgaagccaggcaggaaaaaaaagtccatatagataaacatttgcaaagctgctactgccattgtacagtgttaaaatgtgttctaccttgcatctttaaataaagattaataaaagttttggtttttccctttttaaccttttttt[134 bp omitted]cacggtgaaacctggtctctactaaaaatacaaaaaattagccgggcgtggtggcaggcgcctgtagtcccagctacttgggaggctgaggcaggagaatggcatgaacccgggaggcagagcttgcagggagctgagatcacgccactgcactccagcctgggcaacagagtgagactctgtctcaaaaaaacaaaaaagtatatagtaagtatagaaaatatatgaattaaaaaatcaatgccgagcgtgatggctcaaacctataatcccagcactttgggaggccggggtgggcagatcacctggggttggaagttcgagaccagcctggctaacgtggggaaaccccatctctactaaaaatacaagtttaggtgggcgtggtggtacgtgcttgtaatcccagctacttgggaggctgaggcagaagaattgcttgaggagacggagacagggaataggagatggaggttgccgtgatcccagatagcaccactgcacttcagcctgggtgacagagtgagactctgtctcaca[131 bp omitted]tgaaacaccatctctactaaaaatacaaaaattagccgcccatggtggtgcacctgtaatcccagctccttgggaggctgaggcagtagaatcacttgaacctgggaggtggagtttgcagtgagcttagattgcaccactgtactccactctgggcaacagagcaagactctgtctcaaaatatatataatatatattattatgtatatatataatatatattattatgtatatgtgtaatatatattattatgtatatatataatatatatattatatcataatcccttccctcactaagtaatcactgacctacttggtacaataaatatttccttgcttttagtaagaacacacccctaaatgcaatggtttattttgcttgcttttgaactctatagaaataaaatcaggcctggcgcagtggctctcgcctgtaatcccaccactttgggaggccgaggcgggcagatcatgagatcaggagattgagactatcctggccaacatggtgaaatcctgtctctattaaaaatacaaaagttagctgggtgtggtctcacgcacctgtaatcccagctacttgggaggctgaggcaagagaatcacttgcaccggggagccggaggttgcagtgagtcgagatcgcgccactgaactctagcctggccacagagcaagactgcatctccaaaaaaaaaaaaaaaaaaaaaaaaaaatagaattatagggtatatacacttttgtttctgatttctttcaatcaacatttattttaaagattcagtcatgttattgtatagtgctatagataatttttttagattcaaagatttttattttttacaaaaccccagaataataaacgttataattatacatttaaatctggttgtaagttttatcctggcagctatttgtcaatatgccttctagttagagaggttctgcaagttataatttacatacaaagatatttcgcaattttttttttttttgagacggagtctcactctgtcgcccaggctggagtgcagcggggtgatctcggctcactgcaacctccacctcctggttcgagcaattctcctgcctcagcctcctgagcagctggaactacaggtatgcgccaccacgcctaatttttgcttttttttttttttttttttttttttttagacggttttcgctcttgttgcccaggctggagtgcaatggtgtgatctcggttcactgcaacttccgcctcccgggttcaagcgattgtcctgcctcagcctcccgagtagctgggattacaggcgcccgccaccacgcccggctaattttcgtatttttagtagagatggggtttcaccatgttggccagcctggtctcgaactcctgacttcaggtgatccgcccgccttggcctcccaaagtgctaggattacaggcgtgagccaccgcagtagtcccagttttgttttgtttttttgttttttgtttttgatatctcaattcctacagttgaggaaacaaactaggagaggagaagaggaggcggaactcaagtgacgggaaagcaggaactgaagaagcggaggaaggatttcaaaattggacgaaagccggtcggttttactaacggaccggaaggactctagagaacgctctgcactatggctggtcccgtgagcttgcgagaccttctaatgggagcatcagcctggatgggctctgaaagtcccggagggtcccctactgagggcggagggagcgcggctggcggaccggagcctccatggcgggaggatgagatctgcgttgtgggaatcttcggcaagacggctctacgcctgaattccgagaagttctctcttgtgaatacggtgtgcgaccgacaggtctttcctctctttcgccaccaagatcctggggatccaggacctggaatcagaactgaggctggcgccgtgggtgaggccggtggagccgaggaccctggggctgcagccgggggttcagttcggggaagtggagctgtcgcggaaggtaaccgaactgaggcaggctcccaggactacagccttctgcaggcctactacagtcaggaaagcaaagttctgtatcttctcctcacctccatctgtgacaattcacagcttctccgggcttgtcgggctcttcagagcggggaagctggaggtggactctctttacctcatgcagaagcacacgagttctggaagcatcaagagaagctgcagtgcctcagtctcctttacctattctctgtctgtcatatcttgcttctggtccatcccacttgttcctttgatatcacttatgatcgagtattcagagccctggatgggctgagacagaaggtcctgccgctccttaaaacagccattaaggattgtccagttggcaaagactggaagctaaactgccgaccttgcccacctagactccttttcctctttcaactcaatggagccctcaaggtagaacctcctcggaaccaagacccagctcatccagacaagcccaagaaacattctcccaaaaggaggctgcagcatgccctggaggaccagatctatagaatcttccggaagagtcgtgtcttgactaatcagagcatcaactgcctctttactgtgcctgccaaccaagctttcgtgtacatagtaccgggaagccaggaggaggacccagtaggtatgttgctggaccaacttaggagtcattgtactgtgaaggacccggaatctttgctggtgcctgcacccctttctgggcctaggcgataccaggtgatgaggcagcacagccgacaacaactttcctttcacattgacagcagcagttccagttcttcaggccagctagtggatttcactcttcgggaattcctatggcagcatgtggagctagttctaagcaagaaaggtttcgatgacagtgtgggcaggaacccacagccttcccattttgaacttcctacttatcagaagtggatctcagcagcttcaaaactgtatgaggtggctattgatgggaaagaagaggacttggggtcacccactggagagctaacatctaagattttaagcagtattaaagtcttggaaggatttttggatattgacacaaaattctcagaaaaccgatgccaaaaagctttacccatggcccacagtgcctaccagtcaaatttgcctcataattacacaatgactgtccataagaatcagcttgcccaggctcttcgagtgtacagtcaacatgctagaggtccagcatttcacaaatacgccatgcagttacatgaggactgctacaaattttggagcaatggccatcagctctgtgaggagaggagtttaactgatcaacactgtgtgcacaaatttcactcattacctaaatcaggtagctaaaatttgttcagcattttgaaataaaaactttgagctgtgttttcattcttgttttaagatagtctgttcactatgtattgatattttagaaagagccctacagaaatttaggtgcatcagctatacgttttctctcctgctgtaaaaggaaaatatcagctatgactactttcttattttttttcatttaaaggatacgtcctagtgaattggtaagtgagaattattaagtagtataaaatttcagacatctcatattaacactttgccttggaggatttgtagaactaaaatgaatgttatgttagatgatggtacatgataatggtagcaggaggaaaaattcacttaaaaactctaaactttacatttataatataaagtattttatatactttcacttgcttcttctgttatgtgtatttaggtaaggtttttgtttgtggggttagatgttgtagaatgcaaagtaaattcgcacattgtgtttatgaaattaatagtggctgttatattttccaggagaaaaaccagaggctgatagaaatccgcctgtgctatatcacaatagccgagctcgatctactggtgcttgcaactgtggaaggaaacaagcacctcgagatgatccctttgatatcaaagcagccaattatgacttctatcaggtagactctgaattttttcttcttcctcttctgtctttttttgttaaatatcatctgagtaaaaacatattttcaatagcagagtaagtagaaaagcaaatgcaactgcagtataatatataaacaggagcaaattctttatgtgtacatatttacttacacatcaattattgatcttgttagaatgaagaatattatttaaaatgaaaaacttactggattttttttcttaccctctatagcttctggaagaaaagtgttgtggaaaattggatcatatcaatttcccagtatttgaaccaagtactccagatcctgctcctgctaaaaatgaatcctctcctgctcctccagattcggatgctgataaacttaaagaaaaagaacctcaaacccaaggagagagcacgagcctgagtttagctttgagtttgggccaatccacagatagcttaggtacctatccagctgatccacaagcaggaggagataatccagaagttcatggtcaagtagaagtgaaaactgagaagaggccaaacttcgttgatcgacaggcatccacagttgagtatctcccaggcatgctacattcaaattgccctaaaggtctcctacccaaattctccagctggtctttggttaaactaggccctgctaagtcttataactttcatacaggtttggaccaacagggctttattccaggaacaaattatcttatgccttgggacattgtcatcaggactagagctgaagatgaaggagacttagacacaaactcttggcctgctccaaataaagctattcctggaaagagaagtgcggttgtaatgggaagaggaagacggcgagatgacatagctcgagcttttgtgggctttgaatatgaagactctcgaggtcggagattcatgtgctctgggcctgacaaagtaatgaaagtaatgggaagtgggccaaaggaatcagctttaaaagccctaaatagtgacatgcccttatatattctgtcatcctctcaaggtagagggctgaaacctcattatgctcaacttatgaggctttttgttgtggttcctgatgctcctttgcagataatactaatgcctcaggtaagaaatataaccctctgcagccccaaacaagtaaaaaatgctgatgtttgttttgattgattttaaaaagtacaagttagcctcaaaactaattatttcaggctgagggcagtggctcatgcttgtaatcccagaactttgggaggccaaggtgggaggattgcttgagcccaggagtttaagaccagcctgagcaacatagtgagacttgtatctctacaaaaaattaaattaaaaaacgaattatttaattaaacaggtcttaaatttaaataccttccatacctaatattctgttttttaaaaaatacattgtgggtattttaatccgttcatgctatcaattcacatcatttcattcaaaggcagaacttgaagttaaaattctggagaaaaggccgggtacagtgagtcacgcctgtatttccagcactttgggaggccaaggc[131 bp omitted]gaggcaggagaatcacttgaatcaacctgtaagcggaggttgcagtgagccgagatcgcgccattgcactccagcctgggtgactaagaaagactccattccccctgcaaaaaaaaaagttctggggaaaagcagaataatatttgagactaaataatatactattggatacaattagagttaggagtgtacccatatctgcttaatcttatatattcttttatttatttatttgtttgtttttttgagacagtctcgctctgttgcacaggctggagggcagtggtgcaatctcagctcactgcacctccgcctcctgggttcaagctgttctcctgccccagcctccccagtaacagattacaggcacacgccaccacacctgactaattttttgtatttttagtagacatggggtttctccatgttggccaggctggtctcgaactcctgacctcgtgattcacctgcctcagcctcccaaagtgctggaattacaggcgtgagccaccaggtctggccttgtatgttctttgaacctatcgtctgtttaggcatttatctttcagttgtttcatattgagaaatgtgaaaataattatactacctgtgtttttcaggttcagccaggcccaccaccatgtccggtattctacccagaaaaacaagaaatcacccttccacctgatggcctttgggttttgagatttccttatgcatatgtgactgagagaggaccttgtttcccccctaaggaaaatgtgcagttaatgagctacaaggtgctccgtggggttcttaaggcagtaacacaataagtgttttccagccagttcaatcctatacttgagctggtttttgtttttggtatttgtggctgtgtttttggtatgtgtttactgtgttttcccaaatccaaaatgtgttttggttacaggagttcagtatttggaaactaatttgttctactttttcattatattgttgatatttattgtaaacgtgactacaactttctaataaagattggttgttctagaaaagaatataaaatacatggatgatacctgttttttctcgtttctgttttactctccataattaaacatgtttctattataactgaatgttgcataaccatgttgag[135 bp omitted]gtggacttcgcctcccaggttcaagccattctcctgcctcagcctcccaaatagctgggattataggcatgcgcctccacgcctggctaattttgtacttttagtagagacggtttctccaccttggccaggctggtctcgaactcctgacctcaggaggtgatccgcccaccttgtcctcccaaagtgctgggattacaggcatgaactaccaagcccagcctagctgggattttttttaagatactagtcttgaaattatcttctaaacaagttgatacattaggttatctggtaataatatgaagatacttgatttaattccaaaaaaagcacaattggttgactcacaattctggtactttagttaaacggttttgttcttatcttggcctgatgagataccataatttaaacgaatattatctaaactaaactttttaatccagtatattaatgcgaactattcttttttttttttttttgagacggagtctcactctgtcacccaggctggagtgcagtggcgggatcttggctcattgcagcctccgcctcctgggttcaagtgattctcctgcctcagcctcctgagtagccgggattatgggcacgtgccatgacgcctagctaatttttgtatttttagtagaggtgggattttgccaagttgcccaggctggtcttgaactcctgacctcaggtgatccacctgccttggcctcccaaagtcttgggattacaggcgtgagccaccttgcctggtcaatgcagactattctttaaaaattcctgtactgtgaaacaatttgctaagtgatccaaatcttatcaatcaggctgggcacaatggctcatgcctttaattgcagcactttaggaggtttaggtggcaggaggatcccttaagaccagcctggaagacatagtgagaccttgtctctacaaagaaaaaaaaaaaagataaagatgtggtggtgcatgcctgtagtcccagctactcaggaggctgaggtgggaggatggcttgaccccagtgggtctaggctgcagtgagctgtgatcataccaccccaacagagc[133 bp omitted]aaccgcatctctactaaaaatacaaaacctagctgggtgtagtggcacacccctgtagtcccagctactcgggaggctgaggcaggagaatcacttgaatccgggaggcggaagttgcagtgagccaagattgcgccactgcattccagcctggtgacagagtgaggcttcgtctcaaaaaaaaaaaaaaaaaaaaaaaaaaattcttaccaatctatggtaactttcaccagcatccacatgacaatatgccactatatcaccatctaatttttatcaccatctagttgttatcaccaatcagatggcaatatagtggtatattgtgatatatcaccaattaggtaagtacaaattaagttaacatacctaaactcttgtgtaattgattacatttccatagacacactaattttgaaacgttggacaaatagaattgtagattttagtctcaatatataggaaatatgtatttaacacatcttgctacatttaaagccattgttttttaatttaaaaatatacataggctgggtgcggtggcttacacctgtaatcct[132 bp omitted]gaggcaggagaatcacttggacccaggaggcagaggttgcagtgagccaagattgcgccactgcactccagcctgggtaacagagtgagactccatctcaaaaaaaaaaaaaaaaagtaaatgctcctctttcttctctcgccttcattaaaagaaaattatataaaataataaaagaattcagaactctgactttgaattcatacttttcctgttgttctgtcttcttagaaaatataagaatgaacctgtaatcccaggactttgggaggccaaggtgggcagatcacttgaggtcaggagttcaagaccagtctggccaacatggtg[133 bp omitted]gaaaccctgtctctactattagccgggccaggtgatgcatgcctgtaatcccagctactcgggaggctgaggcagaagaatcgctggaacccgggaggcagaggttgtggtgagctgaaatcgtgccattgcactccagcctagacaacaagagcgaaactccttttcaaaaagaaaagaaaagaaaagaaaaatatacacacacacaatattagccaggcgcggtggtgcgcatctgtagccccagctactcaggaggctgaggcaggagaatcacttgaacccccggggaggcagaggatgcagtgagccgagatggcactgctgaactccagcctggaccacagagtgagactctgtctaaaaaaaaaaaaaaagcggttagaatttgaggtttatatataatctaaaatttacgggtgggaaggggtagggggtacttccagaagaacaaatgacttcttagaagctggggagaaagcactttttggaaaaagaaatgattttttggaaacataaatgtgtccttaggagaatacccatgagatgtcatacttttgtgacaatgtctctcatctctgacaggattagaattgttcccagggaggagatttatgacagttaagttcttctgggagcctttgattttaggttgataagggattccaggaacttaaatgccttcagctcaatatatatatattttttaagagacagagtcttgctctgtcgcccaggctggggtgccgtggcatgatcttggctcactgcaagctccgcctcccaggttcaagccattctcctgcctcagcctccctagtagctgggactacaggcatgcaccactatgcctggcttatttttgtatttttagtagatacggggtttcaccatg[137 bp omitted]ttccatagtcatcaggtgatattttgaaaaatagaactatgtgcgtcagttgatctacaggaaatagtttaacagccctaaacagaacacatgattttttaacctgtaagtttcctcagaatgttgctctgttgcccaggctggagtgcagtggcaccatcaaggctcacttcaacctcgactaaaggaatttttttttttttttttttttttttttttttttttttttttgagacggagtctcgctctgtcacccaggctggagtgcagtggcgccttctcggctcattgcaacctctgcctcccgggtccaagagattctcctgcctcggcctcctgagtagctgggatcacaggcacacgccaccacccctggcaaatttttgtatttttagtagagatggaatttcgccatgttggccaggctcctgacttcaaatgatctgcccgcctcagcctcccaaagtgctgggattacaggcttgagccaccgtgcccagccaccccctattttcttctaattttctttttatagttgagatagggtcttgctctgtcgcccaggctggggtgcagtggtgcagtcatagctcactgcagcctcgattttccaggctcaagcaatactcccacttcagcctcccaagtagcgtgactacaggtgcacgccaccacgccgggcttattttgttttattttttgtagagatggggtttcgccatgttgcccaggctggtctcgaactcccgggctcaagcgatccacccttccttcccggcctccctaagtgctgggattacaggcgtgggccaccgcgcccggctgaatcaggattttaaatattcactctgcttttctagtcctgtgggagatatggtcttctccgtaaaatttctccctcagtcctgggtgatttatttcttttgcattgaagtgtgtggcttttcgtgtgttagcagtttgtaatttgtcgggtaaaaggaaaactagtagggccttctggaacttagttatctgtctttctaggacttttaggtaataccttataaccttaacaaagtttccttattttatacggacttgtaagtcaacaaatacttctacagtgcctattgtgtacaaagaatgaggattgcactttcacaatgaaatgagggaggacaggggccgatctctcagatatttgactgataaaccagtaccttttctagtatatgcgaccataggggaaattctctctaggctagataaacggaggagtttatttagtgttttagcaagctttatcgcctccataggtacaaattatttgcattttctagagcaagggataagacgcgccctggaatctttcctttttgatgtggattttccaattaggaaaggctgcccgtgaatagtcttttctgcttgagtgatggccaacacactggcaggtttgcaagctttctcttcatgagggtccgtccacagagctaggtgacaaacgctcagtccaggatctctgcaggttcctacacgggagccggagagcgcctgcgcgtcggagcctctttgttgctggggcgctggggtccagctgcgcgtgcgcagtaggccggcaccgacaagtgcgctgcaccagtggcaccggctgggggcgagccgacctcgagcagccgccgccgccgccgtcgttgctactgccgcagcggagttcagagggcccggaggtgggagacttcccacacggtgactgagatgtcgtccactgcggctttttaccttctctctacgctaggaggatacttggtgacctcattcttgttgcttaaatacccgaccttgctgcaccagagaaagaagcagcgattcctcagtaaacacatctctcaccgcggaggtgagaggggtccccagaacccgatgacggaggtgggggaggctgagggtcctttgcggctccgcaaaaggcagccgggtgccaatccctgagagtttgaggaagaatggggttgtgtgaattgagggctcttccggaggtgaaggctgtgtgaagggaaggtctcctgaggggagggaaggagagggattcccggtcagagccacggcgggggtctctcgagggcagcagtgtgaggggttctctgaaacgggaaagacacggtcgagaatgaagggtaggtggagcgtttctcggcggatggaaggatgatcgcaaggtcccttcctagcagcaagacacaaagggggagcgccgtgcagaaccgagggtaccccgcggggggcaccgggagcacactgctccgagcgagctagtggctgagtggatgggaagagccgaggcgacgaggagggctggggatttgcatgaagctggacgagctgtaaccccttgtctgcggtgctgggggcccgtcccacccccacgttccgagcactcataattgagaagagagggaaaccgagtcccccgagccagggacatttcccaaggtcacaattagagctagggctgaactgagacaggagctacagcgtcctggtcctcagggctggaaaccttgcatctttttttttttttttttgaacactgcaataaataaataaataaataaataaataaataaacacgcaaagacacgtggattttcaacagactaaaaatgatttcgtttaggacaggacagtattgtttaaagaaaacaaaaataagtttcttttggaaaagtgttttgctaaaaggagcccaggtagtccaccctctaatttcccagataacaggccaaatctttgcttcttcattattgtgtaataatgtgtcttcattgcatttcaactatgatgtataaagtgcggtgaaattggattattttcaatcaattttaactgttctttaaggctgaatcttaaaccggtttaaaatttgcttgaaatttaatacacacttgaaatgataatttctaggagtttacagtctaaaacttggtgtagtaccataatcactttactaacaagtattggccaaggaaaaaggttttgaaatataaatacggaagtacattatcattcttctatataattttattagttaagcatagttctaatgagtgacttcaatagtattctagccttcccactcatgaaaagcctcagaggttttaaagggtggtcagccaaatgccttgttattgtttatttgggttatctgttttaatagctacctggttaaactgtaggatgacatttaactactaaggtgccttcaaccattggaaccagggaccgacttttagtattcaagttgctgtcacagaagcaattttcttttttctttttgtgtttttgtttgtttgtttttttgtttgtttgttttgagatggagtctcggtctgtcacccaggctgaagtgcagtggcgcgatctcggctcactgcaagctcctcctcccgggttcacgccattctcctgcctcagcctcccgagtagctgggactacaggcgcccgccaccacacccagttaattttttttatttttagtagagacggggtttcactgtctgagccaggatggtctcgatttcctgacctcgtgatccgcccatct[135 bp omitted]gcagcctctgcctcctgtgttcaagcgattctcctgcctcagcctcccgagtagctgggattacaggctcccgccaccacgcacagctaatttttgtatttttagtggagacgaggtttcaccatgttggccaggctgatctcaaactcctgacctcaggtgatccacccgccttagcctcccaaagtgttgggattacaggcgtgagacactgcaccctgccagaggcaattttcaatgatagtagtcctattctggggataggcagtacacattacttttttgtttgttgtttaccgatttacaaaaagtatgcttactaaaaactccaaaacaaaacaaaaccagatcctctaaaaagctatctaaactgtcattgtgaatgatcaaaattttattttagaagaaatacttgtcgatctttgaaattttgcaacactctgcaggtgaaaaaacccagcactccataggcgttaaagactgtgtgctagattatcacaacaagtatcaaagccaggataagctagacctcaaattttcgtttactgttgaaaatactttaaaactattttcttcctagatattaggtcatttcaatattacctcttatataaaaatttccattcattatttgtaaatgcggcatcagtatttatatatttaaagatgtaatggaactttttgtgataatcttattaaatatctgcagactcaaaatctgttttacctatataatggtcctataaacactgtggtaagttcccatgtcagtgcttcatatgcttttgttgaatatgtacactcaatactccagttgaatccagagtgatagaggagataaaacactttgtaattcaagatactacgtctctggaaaataagagacaatgtaactaggaaggaatcactccattgattgcctttaatttttgtcttcgacacggataatagcaatcactggtctctctgtgcaatttgggcttattctctactgccataactgcaaatacctgatatttacttatttttccctataagtaaggaaacagtgatatttcttgtaaattagatatgtgaccattgaaacattaatcatgttatgtgtataaagtatatgcaactgaattgacataacctaaaacttgaatatctactctatttctagaatattatgtctactgcaaaaacacatgtctgtaatcccagctattcaagaggccgaggcaggagaatcacttgaacctgggaggcggaggttgcagtgagccgagatggtgccactgcactccagctcaggcgacagtgcgagactccgtcagggcactccgaggggttgaatcacagatggacagatggctctttctctctccaccttttttttgagacaagttctcactctgtcacccaggctggagggcagtgatgcaatcactgccatcatgatgagcttgacatcatttaattcttaaagactttcctaatgaactcagatgttaacaaatgtgatttttaaaatattgcataccgtgtcaacatatagaagaccagcatgattcaatgaatcaatagtttccaaatgatttatgcatgctattataaaatcatgcatgggtgaaagatcattcaaagttcaagatgggccaatggattttcacataatagagtatgaagtgattactcatatggttcaaattccatattgcaatgaccttttaagaaactaccacttgtaagaaactaccacttgtgggccgagcaaggtggctcatgcctataatcccagcactttgggaggccgaagcgggcggatcacggagtcaggaaatcgagaccatcctggctaacgatggtgaaacaccgtcgctactaaaaatacaaaaaaagttagctgagcgtggtggcgggcgcctgtagtcccagctactcaggaggc[134 bp omitted]aaactacgacttgttgagccgggtgtgatggtgcctacctgtagtctcggctatttgagaggctgaggcaggaggatcacttgagcccaggaatttgaggttgttgctatgatcgtgcctgtgaatagccgctgaacttcagcttgggcgacatagcaagaccctgtctgtaaagtaaacaaattaccacttattgaaatttgatgccatatcaaagaagactcatttccaactacatatctgtgtgacaatgggtatatatgaagcagatatgagaatcttgctgctttctgttaagtcagatattaaagagatttgcaaaaatataaaacaataccactcttttcatacattattttatttagaaaaacagttacttttcataaaaatgttattttaacatataatgtgtttattattttctttcttttctttttttttttttttttttgagatggaatcttgctctgttgcccaggctggagtccagtggtatgatctcggctcactgcaacctccacctcccaggttcaagtaatcctggtgcctcagcctcctgaatagctggggttacaggtggtgccaccacgcccagctaatttttattttttattttttgtatttttagtagagatgggtttttgccatgttgcccaggctagtctcgatctcctgagctcaggcaattagcctgcctcacctcccatagtgctaggattacaggcatgagccaccacacctggcctattttcaaagcaaggtagttaaaaggatgcagaaatcagcttgaaggaactaatgaagttgactttgatcacttgatgaggtggtgtctgccaagcttttccactgtgaggttactttttctccttataattaataagagaaaaggctcataattaataagaggccacccaccgcggcctcccaaagtgctgggattacaggcatgagccactgtgctcggccaatttttggagggagatactttaaaactacacaaatacccaattccttaacaaattatcaatccatttattaaaattgattcaaaatttattttattttattattattttttgagacgaagtcttgcttagtctcccaggctggagtgcagtggtgggatcttagctcacagcaacttccacctctagggttcaagtgattctcctgcctctgcctcccaagtagctgagactacaggtacctaccaccatgcccggctaatttttgtacttttagtagagatggggttcaccatgttggccaggctggtctcaaactcctgacctcagatgatccaccagcttctgcctctcaaagtgctgggattacaggcatgagccaccgtgcccagcctggattcagaatttcttattcactgatttaaaaatctgtttactatcattattttgatgctagcactgtcccagatttgtccagtgagaggtccttcaagctggcttttgtgttcttttaatttctttgctctttggtacaagtggtcagtagtttaacttaacttactggtaacccctttagcactcttgtctttttagaaatattttgtggtgctttgtttttgaatattatctgaatataatgtatttccatagttttagatcaaaacaagggccaactagcctcatccagtaaagggttatctaaccttgaaaggagacttaaaaaaaaaaacctatacccttcatatttactgcatctgttttctatcatgcatcaactctagtaaccaagtgaacctaaaatcaaactagtagttttttgtttttacgtgggtatcttccctctgctaaagttataaaattttagcatattaaagctaatgtatttgtttctgcatatcttgtatttctgttgattattaattaggtcatcataaaaatacaacctaacaatataaaagaagaaaaatttaatacaaatatgttcagatggtattgtatataaaacattttaatgctaatacttaagtcctttaggtactttgagcagtaccttttgtgtgtgtgtgtgatggagttttgatgttgttgcccaggctggaatgcagtggcgcgatctcagctcactgcaacttccgccccctgggttcaatcaattctctgtctcagc[137 bp omitted]cggcctcccaatgtgtggggattacaggcatgaaccaccgcgcccaccctgagcagtacctttttattgagagtttattgaattgtctctttctattaagaagaaattgactgtttttccaaagtgtatggaaaattatttccaaagtatttttctgtatatttcatcaattatttggtaaca[205 bp omitted]gaggcaggagaatcacttgaacccaggaggtggaggttgcagtgagctgagattgcaccactgcactccagcctgagcgacggagcaagattccaactaaaaaaaaaaaaaatttaaaacttttgggtagcatgcataaagttagttaactctttttacatagtatataatattagacaatattttataattcaatatgttcacatcaaaatctgtgtccttttttaaaaattacaatattatttattattgcagttaatggacatttaccaagtacctattctttaccagttactatgataatggcaatagtaataataattctaataatagcaataatcctttactttcatggaatgtttactctagtatttcattgaatctaatgccattggttataaatacacaatttttacatactgttaagaaagagacctctataaaagttgatttaaaataagagagaaaatcttgccaattaaactgttcattatacagcattaattgtaaaatacatcttaacttcagagatgttaagaaatgaaaagttatcattttagaattgaatggctgggcacagtggcttacgcctgtaatcacagcactttgggaggccgag[131 bp omitted]gctgaggcaggagaattgcttgaacccaggaggtggaggttgcagtgagccgagattgtgccactgcacttcagcctgggtgacaaagaaagactccatctaaaaaaaaaaaaaaaaaaaaaaattgataaaatacagcagtttaaatattaactcatttgattataccaattctatgaaagtttcttaggtagcttttctaaggtcacacaattattaaacagattggagaccaagcatcctaaaactccagagtctcacccttaaccactagactatactgccttcagtcaaggtgattaaaacacagtcacttcttttaagcaattcatgggaatgggaggagagaaacaggtaaataatttatgccataatatgataaatgccttagtagagctatgcataagagactatggggatacagaggagagactgtttaactctgtctgaggagacttatgtgtaccaaatcctcttctgtctttcctttgacaaataagtggatattatagcttaaaaatcatggttaggccagccaggcacagtggctcatgcctgtaatcccagcactgtgaagctgaggcaggaggattgcttgagtctaggagtttgagaccagcctgggcaacatagtaagaccctgtctctaaaaaaaaaaaaaattagctgagcatggtggcatgtgcctgtagtcctagctacttgggaggctgagactggaagattgcttgagctaggagtttgaggctgcagtgagctccgaccatgccactgcactccagcctgggcaacagagtgagaccctgtctcagaaaaaaaaaaaaaatcagtttaggttctgttttaaccctcctgtgttactgtggctgtgttttgatttttgatttctactgttgcagctaaaaaaaaattcaaaatacaggttaagcttccctaatctgaaaacctgaaatgctccaaaatctgaaactttttgagcacagacataactccacaagtagaaaattcctagtaaaaaataacatgaggaaaaaaatttttttcctca[146 bp omitted]ctgcctcagcctccgagtagctgggattacagatgcccgtcaccatgcctggctaaatttttttttttttttgacacagaagtgcctgtaaactgggattacaggcacctgccaccatacccagctaatttttgtatttttagtagagatggggtttcgccatgttggccaggctggtctcgaactcctgacctcaggtgatctgcccgcctcggcctcccaaagtgctggaattacaggcgtgagccactgcgcctggcctaatttttgtatttttagtagagatgggggtt[136 bp omitted]taacgaattccacacctgacctcatgtgacaggttgcagtcaaaacaaaagcaaacaacacacggcttattcagcgtccccaagggaaaaaagactcttccagctcccttcagttacaatatatcttttctgagtatgtccaggtttccttatgcaagcgtgcccacaaagggtaataaaatggcacatgttcagactgatcacaccaacagcagattccccatgatgccctacatggtgccaagacctatatgcattatttattgtgtgtttttgtttgcttgcttgcttgcttattctctgctctttggtataaagatgtgaaaatatcaaaaaggaccacagatacccctatgggttatagtgatgagaaaaataggtaacatttatgtttatctatagcacagaaagtcaaggtgttatagaaactgaacactggtgtaagtgtgaaataccttacagaggatatggtattagaatgaccactatatatgacctgaagaaaaagaaggataaactgttgaagttttatatatatcagaagtagtatatataaagtggaagtgatgaacagaagttaattaaaaatagaaaaactgcataaagctaaaatgaagatctcaagcgatgaagttaaaatgaaaggaactgtgaatattgaacaggccagttgtagaattttttttttttttttttttttttttttttagatggagttttgctcttgttgcccaggctggagtgcaatggcgcgatcttggctcactgcaacctccgcctcccgggttcaagcgattctcctgcctcagcctctcgagtagctgggattacaggcatgcgccaccatgcccggctaattttgtatttttattagagctggggttcctccatgttcgtcaggctggtcttgaactcccgacctcaggtgatccgcctgcctcagcctcccaaagtgctggcattacaggtgtgagccaccatgcccggcccagttgcagaaatttaagagaagacatggcattacatttttaaagattaaaggtgattagcatctgctggtcacgaagcagcaaagaaatacattgacaagtttgccagggtcattgctgttgaaaatctgacacaagaacaagtctataatcctgatgaaacaacactcttttggcattattgccccagaaagacactgactgcagctgatgagatggaaattaaggatgccaatgacagaataactgtgttaggatatgctgatgtagcaggcatgcataagtgtaaacttgctgtggtaggcaaaagcttccttcctcactgtcttcaaggagtgaatttcttaccagtccgttatgctaccaaaaaggcatgcatgggtcaccagggacatcttttctgattggtttcacaaacattttgtaccagcggctcgtgctcactgctggcaagttggactggatgacaactgcaagattttgttactccttgataactgttctgcttatccaccagctgacattctcatcaaaaataatgtttatgccatgtactttcccctaaacgtgactttagtaattccatgtgaccaggctatgcttggatcaatgagagtaaatatgaaaacattttctttctttcttttttttttttttttttttga[232 bp omitted]gcctcccaaagtcctggtattacaggcgtgagccaccgcgcccagccaaaaacattttattgtgcaagcagtgataaacagaggtgtgggtgtgaccttttgttcttttttaagttttttttatttaaaattaagacaactgcagattgtccccatggatgactaacatcgttgactcctttgctttctgatggttcagggtacacaaacattgtttcatgcataaaattatttaaaattatttttgctgtgttgcccaggctggtctcaaactcctgggctcaagcgatctttctacctcagcctcccaaaatgctaggattataggcatgagccaccatgccctgccagaaagttttcaaaaggagtttagcatgaaggatgtcttgtatactgttgccaatgcttggaaatcagtgaataaagataaatttgtgcatgtctggcacaactctggcctttgactatgtttagcgatgataatgaacaagttggtgacttttaaggatgccatatgtcgacaaagtgagaaaaaaatgatgtctgacctccttacatatacaaaaaattgccttcagaatttgtcagtacaagctgggcgcggtggctcaagcctgtaatcccagcactttgggaggccaaggcgggcggatcacaaggtcaggagttcgagatcagcatggccaatatggtgaaaccccatctctactaaaaataaaaaattagccgggtgtggtggtatatgcctgtagtcccagctgcttgggaggctgaggcaggagaatcgcttgaacctgggaggcggaggttacgttgagccgagatcacgccactgcactccagactgggtgacagagcgagactccgtctcaaaaaaaaaaaaaaaatttgtcagtacactgaaagaaatggatatcgaagaagtttttaacgttgatcatgaggttctagttgttcattaattgaccaatggtgaaatagccaaaatggttctgaatcaaggtgatcatgataatagacattataacaatatagatgatgttaacatggcataaaaagtgcccatagacaacatgatgaaaatatgtgatgagcttattgaaggactagagcagggtgcatttataacaggacaagaaatcatgttcttttataaaatcaaagagagacttctaagacaaaaacttgtcagtaaggcacatgactctggaggaaacattttaaaaagccatctagcagaattccccctcactcctagagaacccacttcctggtccttcaactacttctgatgtttcttctcacttaaaaaaaaaataacagtgtatggtaattttttaatcaaaacacagtgaggctggatgcagtggctcacacccgtaatcccagcactttgggaggctgaggtgggcagatcacttgaggccaggagttcaagaccagcctggccatcatggcaaaaccccatctctactaaaagtataaaaattagccaggcatggtggcacacacctgtaatcccagctacttaggaggctggggcacaagaatcacttgaacctttcaggtggaggttgcagtgagccgagatcatgccactgcacttcagcc[139 bp omitted]cggtgaaaccccgtctctactaaaaaacaaaaaattagccgggcgtggtggtgggcgcctgtagtcccagctactcgggaggctgagaca[137 bp omitted]gagacaggtggagactaaacacctgccttttttgttgctgtttttaacaactgatataggtattctggtgatgctactatgttacttagttaccctgaacattattttttcattgcattagtggtatttcgtattttttactgttaagtacttatgtatgaataagtgtaagaaaatgcttatcggtagcctataaattcagtcaagaatgatggtgatgccaaacaactacagattgttctcatgaatgatgaagagagtggctcctttgttttctgatggttcagtgtacacaaactttgtttcgtgcataaaattatttaaaatattgtgtaaaattatcttcaagctatgtgtatgaggagtatatgaaaactaaataaattttatgtttaggcttgggttctatccccaagatctctcattatatatatgcagatattccaaaatctaaagaagtcagaaatccaaaacacttccaggcccaagcattttggataagggatactgaacctgtaccattacactctttaaaacacttgtacactttgggaggcc[136 bp omitted]ctgaggcaggagaatggtgtgaactcgggaggcggagcttgcagtcagccgaaatcacgccactgcactccagcctgggtgacagagcaagactccgtctcaaaaaaacccaaaaaaacacttgtaatgtctacccccaaaaaaaaaaaaaaggtcaagattcattaggtgtattttattaaaattaacttcaggaaaattaaaatgttcaaaataagtaaatatagtttaaattttcacaggtgctggagaaaatttggagaatacaatggcagcctttcagcagtaagtatgtaaaaaaggtaaaaggtactcttttcttttacagtttgcaggctttctttaaagtgatgatgatccacaaagtgaggatagtgtaagtgtagcatcagtttgtgatagttgtttctattttgttaaaatttctttttttaattagttggtcagaagtgttacaaagagtttggcttctgtattactgaaaaagcagatgggagtttagggtaatcaaaagatactatagttacaaagctgaaagaagacatttgtaacaaggaatgtactgtgtataatgctaattagtcttggagagaaagagaaaatgaaacaactgttacagtggctgctatttatgaacaggattatgtgtctttgtacccagtaatttttgtacagaactgaacctgcaatctggtttcttcttggaagcctcaggagtgttgatctttttttttttttcaaataaaatacatttttaaattcctatatataatttcatataagtgtcttttagagcacctcacagagaagcagcaggagagacaggaatgaaaactaattaatacctcgttctttgtcttagagtcaatgattatcatcagtctatggtaatcatgagaacactgtttttcctgaaaaataaagcaaaggatgtgaaaagttaaacccaatgaaagacattacctatccataattagtaaggtccatatttagtaagataaatattttcttatataatttttgagccaattaatgtatataattgggactaagaaatttggagaatttgacttcactttttgttctgcttctcaccattcaaagacaccttagagattatttttcctattattattaggtacaaagctattgttttttcatattctagtttcacctaaatcctatcttccttgtatttgtcatctcttactcttcttgttctatactatgatgccttttgtttatgatctcaaaagcctcttacaaaaatgtaaaattttggccaggcatggtggctcacacctgtaatctcaacactttgggaggccaaggcgaggcaggttaatcacctgaggtccggagttcaagaccagcctggccaacgtggtgaaaccccatctctactaaaaatacaaaaattagctgggcgtggtggcatgcgcctgtaagcccagctactcgggagtctggggcatgagaattgcttgaacccgagaggcagaggttgcattgagccgagattgcactgctgcactccagcctgggcaatagagtgagactctatctcaaaaaaaaaaaaaaaaagtaaaatttttcctcctatcacagaccatgaaatggactattttaatttaaatactttatttattttctctacttggattacatatctggctagctagccataactaaatatagatgtataattttatgtgtacaaattatacaacatatacacacactatcatatatcatctgttgcccctgaggtaggtcatacatataacttgagaaaaaaactactcataactttgagtgattttagcattcttcatgcttaaggtacattattttatgtttttctccatatttttttgttaaatttttaccaaccaccattatttatgaaattaaaacactgggttatacaataagttattttaaaggatgatacatttgaaaatatcacaattttttctaacctttgaagattttaatcctcttaacatttttctgatatttaaaggatatctaatttaaatggtttttacttgctaaatacaacatatttttcatcttgaacagtttttatatagttttgttcaaatagtaactactgaaaagtaccacagccttctgtatcatgtggaagctttctattacttaaaaaaaattttttggagatttttctagtacttcagaagaagggaacacctctttcacatgctatttttgttgttgttgttgttgttgtttgtttgtttgagacagagtcttgctctgtcacccaggctggagtgcaatggcgggatctcagctcacggcaatctccacctcccaggttcaaatgatttctctgcctcagcttcccgaatacctgggattagaggtgcccgccacctctctcggctagtttttagttttatctatttatttttttaatagagacaaggttttgctat[143 bp omitted]ggctgcttatcaactgacctagaaatttatataaaacccctctttttttgagtttttcgttgttagtggtggtggtttgtgtatgtgtgttacacattagtgcccttgctatgaatacatactttttaaaattgtagttcaaaaaattacaaatattctactgttaactgctaggaaacttagaaggtttttttttgttttgttttgttttcatacttgtttcattgaataacaagaaaagactgtttaaacatactattttggccagtcgcagtagctcacacctgtaatcccagcactttgggaggccaaggctggtaggtcactggagctcacaagttcaagaccagcctgggcagcagggtgaaaccccatctctagaaaatgcacaaaaaaaattaaccgggcgtggtggtgcaagctgtagtcacagctactctggaggctgaggttggaggatggcttgagcctggaaggtaaaggttacagtgagccgagatggcaccactgtactccagcctgagtgacagagccagaccttgtctcaaaataaataaataaataaaaataaataaacatactgttttaaaggtactgtatattaaaatactaaagagttgtaatgtacaatcaggagaagatacatactatgcttaagtatggtatattcttgatagcatgggtagttgagggagagatagtaaaaataaaatgaccagctaaaacttagatcttatttatgtacatatttaaatacacatttcacaaagcatataaatttcaaaatggaggtgaagatgaggagatattaatgacaatataaatagttggtgtgggaagcctgattaaaattaaccagaaaatcaaaaggtattaagactagaagggctgtcatttgaagacaagaaggagctattttgaaaatgtagggtcagctgggtgcagtggctcacacctgtaatcccagcactttgtggggccaaggcaggcggatcacttgagatgaggagttcgagaccagcttggcgaacatggcaaagccccatctctactaaaaatttaaaaattagctgggcacagcctgggcaacagagcaagactc[144 bp omitted]tctactaaaaagacaaaattagctgggcatggtagcgcatgcctgtaatcccagctacttgggaggctgaggcaggagaatcacttgaacccaggaggcggaggttgcagtgagccaagattgtgccattgcactccagcctgggcaacaagagtgaaactccatctcaaaaaaaaaaaaaaaaaagaagtaattaaaactgacagaagtaattatgtctcacaatgtatgaaatatcctttaatgtggtttataacatgctttcacaaacaccatctcccttaggttatgaatatggctcttctattattttttatttttttttttttccgagacggagtctcactctgttgcccaggctggagtgcagtggcaagatctcggctcactgcaacctctgcctcccaggttcaagcgattctcctgcctcagcctcccgagtagctgggactacaggcgcatgccagcatgcccagctaattttttgtacttgtagtagagacagggtttcaccatgttagccaggatggccccgatctcctgaccttgtgatccacctgccttagcctcccaaagtgctaggattacaggtgtgagccaccgcacccagccttgtgttatttcattaggagcaggaatcttttcttactgatttcaaaattcttaatgcctaactcaggctctgacataaatagacactcactagttgcttactgaatgaaatatggaatgggacattcaggaataaagcagaacattagcaaaagactgatgaaggagacagagcctccttcatagtaaagcacagaagcaaaaactaaggaattgtactatacacatatacacagagccactaaacccttgagtatgtaagatgtggttctcaagggctaataaaactaggttattaaaccaggctgccttaggaaatacccgtaggacaatgtgatacctatagtattagccggaatggtaaggagaaagaagcaaattgtattagcaatagctagaagtgtaagttggcagacagccagagtaattaatcagtgacctggttctcatgataaatattttagaatatctaattaatatgactatctatgaaatgggaatagtgatacaacctcagtgttgtgaagagtaaatgagattcaaataaattctttaacatggtgcctattttaagttgttatgcattgtttctgtggagtttctttcacattttcttttagagctagagtttttatttctttttctggaaatgttgaaaccttggcatctccaacttcttttttgtatttttttttgtatttgtcaacagcttgtcagaaattcagctataaaatatctgatatttcaatggaagtaggtgcatgttgttattcatggaaatttttgaaggcaaaagtgataaaaaaatttttctcactgtgttctagctatttacatatcaaatttgggataattttactagaataatttacaagttgtcctagatacacttattattgttctaatttttttatctattagtttgtcaataacaataagcatacatagaaaatatttttcaaataattcctaaacatttctaaaaatagccagcatttcagctagagacaaacttcaaacttagaaagatttctgaggtaatatgtatagttttttttttttttaattgccagcataggacacactgtttttttttttttaacctccccctctccagctcaagcgatcctcacacttcagcctccctagtagctgggactacagggcatgcctccatgcccggctaatttttcatattttttttagagacggggttttgtagaatgattcacccacctcggcctcccaaaatgctgagattataggcc[136 bp omitted]cctgtctctactaaaaaatacaaaaattagttggcgtggtgatgcgcgcttgtagttccagctactcagaaggctgaggcaggagtatcgcttgaacctggagagcggaagttgcagtgagccgagatcatgccactgcactccagcctgggtgacagagtgagactctgtctcaaaaaaaaaaataagaagtttaaaaatgttaaatagaaaaaaacttacataataaggatataaagaaagaaaatatatttgtacagctgtaaaatgtttgtgttttaaggtattattacgaaagagtcaagttttttaaaatttaaaagtttataaagaagttacagtaagctaaataggtattttttaaattttattatatttttaagagacagggtctcactttgtctcttaggctggagtacagtggcatgatcatagatgaactcctgggctcaagcgatcctcctgcctcagcatcccaagtcactagaactacagggatgtgccactatacctccctaatttttaaatttttttcgtaaagatgagatctctccatgttgcccaggcttgtctccaactcctgacctcaagcaatcctcctggctcggcctcccaaagtgttgggattacaggcatgagccaccgtgccaggtctatttttaaaataaatttcatgttgcctaagtatacagtgtttataaggtctacagtactgtatagtaatgtcctatgccttccattcactcaccactcactcagtgacaccaaaagcaacttccagtcctgcaagctccattcatgataagtgccctaatgcaggtgtcccatttttatcttttatatcatattttaattgtaccctttctgtgtttagacagattcacaagtacttaacactgtgttacatttgcctgtagtatttagtacagtaatgtgctgtacagatttgtaaccacggaacaataggctatactctataacatagatgtttaaataccatctagatttgtgtaagtgcactctgtgatgtccgcacaatgacaaaattgaccatacatttctcagaacatacgcccattgttaagtggtgcatgactttataatatttttatattatgtgttgtaagaatacaggagtatacatttaccccacataggtgattcacagataaaataagaatcatgtgagctagtgtatttatttatttatttatttttgagacggagtttcgcttttgtcgcccaagctggagtgcaatggtgcgatcttggctcactgcaatctctgcctcccgggttcaagcaattctcctgcctcagcctcccgagtagctgagattacaggcatgcgacactatgcctggctaattatttgtatttttagtagaaacggggtttcatcatgttagccagggtggtcttgaactcctgacctcaggtgatctgccgccttggcctcccaaagtgctgggattacaggcatgagccatcgtgcccagcct[142 bp omitted]ctactaaaaatgcaaaaattagctgggcgtggtggcaggtgcttgtaatcccagctacgcaggaggctgagacagaagaatcgcttgaacctgggaggcagaggttgcagtgagccgagattgtgccactcctctttagcctgggcaacaagagcaaaactccgtctgaaaaaataaaaataaaaggatgctcagtgtttattagattaaattcctgctgtaatttactatgatgaggttgaataaattgatgtcaataatattgtcttgtagataagagataatatattctgggtttttttgtttgtttgtttgtttttgagacagagtcttgctctgtcacccaggctggagtgcagtggcataatcttggctcactgcaacctccacttcctgggttcacgagattcttctgcctcagccttccgagtagctgggattacaggcttgtgccaccacattcagctaatttttgtatttttagtagagacagggttttcccatgttggccaggctggccttgaactactgacctcagttgattcgcctgccttggcctcccaaagtgctggaattacaggtgtgagccaccattcctggctaagagatatattcttaatggcagtatatttgtttttccattataaaagtttatattctaaaaattcaaacaactcaaataatctatgtgaagtaaaaaattggcctgctcactttcctactcccattcctactcatctcacttataagaggtaactcctgttatgatttggccttatatctttctattattttaaaaatttacacacaaactttttttacataaactttattttacatcaataaaatcatatgattgatgcagatagtttttgctcctagttcagctaaaaccaggttcttgtcacatgaccaggaaagattaggcacacagacacattcaaaggtgacgagagcaggaatttattaaaagaaagctctcagcaaaaaaagaagtcctgctaacaggctcccacctcatagactgatcaccaggccaccacacatgagctgaagaggccaggcccctcacccctgcacaagggatgaattcccatggctccaccccctccttgcagtgcacatgtgggcattattcagaaagaatctgtccagaggctgggcatggtggttcacacctgtgatcccagcactttgggaagcagatcacctgaggtcaggagtttgagaccagcttgggcaacatggtgaaaccccatctctactcaaaatacaaacattagccaggtgtggtggcgggtacctgtaatctcagctactcgggaagctgaggtgtgggaattgcttgaacctggaaggcagaggttgcattgacccaagatcacgccactgcacttcagcctgggtgacagagtgagactctgtctaaaagaaaaaaaaaattattcaggaaaaggtgggcaggctgggtgcagtggctcacgcctgtaatcccagcattttgggaggccgaagagggtggatcacctgaggtcaggagtttgagaccagcctggccaatatggtaaaactctgtctttaccaaaaatacaaaaattaggtgggcatggtggggcacctgtaatcccagctacttgagaggttgaggcaggagaattgcttgaacctgggaggtggaggttgcggtgagctgagactgtgccgttgcattccagcctgggcaacaagaacgaaactcagtaccccccaaccaaaaaaaaaaaaaaagtgagcgaactggggcagttctccctctgggttgcagttttatcctggaccaacagttcagtctttcagccatcaggctgttttaggcttgaaggtggggttccaccagggatccttggctgtctcctatctccatcatcgtacctattttaaaattcagatataccccaacaatgctattccatgtgaattctatattctttgaatgactacacattacatactatggatttggatcatgattgataaacacttaggtgccaactgagttggaattaattaaaatttaaaatattaatagatgttgataatgaaaacatggctccattcccctcatttagaaatatatttagtacctacaatgtgcccaacaccataaacattagaaaatatggaacagacataggcccttctgttagtggcggtgaatccatagaggtctgcagcaacctcaattcttgcctcctcagaagaaaaaaattgaccgagggcttaaggcagaaggagagaccaaggcaagttttaccacaagagtgaaaggttattaaaaagctttagagcaggaatgaaaagaagtaaagtacatttggaagagggccaagtggtgacttgagagatcaagtgcccagtttgacctttgacttagggttttatatgttgggatactccggggtcttgcgtcccttctcccttgattcttcccttgggatgggctgtctgcatgcacagtagcctgccgctacttgggaggggccacatgtgcagtgtgtttactggagttgtactcatgctctcttgaggcattcttcccttaccagtcgaatgctcctagaagagcattttgtattttagtagagacaaggtttcaccatgttggccaggatagtttcaatctcctgaccttgtgatctacccgccttggcctcccaaagtgctgggattagacgcctgagccaccacacctggccaatttttttgtatttttagtagagatggggtttcaccttgtcggccaggctagtctcaaactcctgacctcaggtgatctgcctgcttttgcctcccatagtgctgggattacaggtgtgagctaccgtgcctgtctaatttggatgcttttgttaatttttttcttgcctaattgctagagctttcaatactatgttaaatcaaagtaataaaagtggccaggtgcagtggctcatgcttttaaaaccttgcactttgggaggctgaggcaggaggatcacatgagcccaggagttcaagaccagcctgaacaacataacaagaccctatctctactaaaaataaaaaaattagctgggcacagtggcatccatctgtagttccagctactcagtaggctgaggcaggaggatcacttgagcccaggagtttgaggatgcaatgagccatgatcatgccattgcactccagcctgggcaacagagcaagactctgtctcaaaaaaataaaataaataaaaataaaaacaagcatccttgtcttgttatttaatcctttcattttatagaagtgaaaatgtagtccctgagagaagaatttacttgcccaaagttatgcaaattcacagcaaagcaggaattaatatcaaatctcttaacttcagattcagtattctgtctattatattcagttgaagaattaaggataactggatatggaaaggaggcaacatgattcttttattctcagttcatttagaatattttcatattaataagtcatactaagtgatggtattaaggagatattttagtattatgggattttggatttgtaactctgaattgttagatctcatgcatgtaacccaaatgtatacttaagtgtcagatgtcattcttcttttatttcttcagtgcggttaaaatcggaactgatatgctagaattggactgccatatcacaaaagatgaacaagttgtagtgtcacatgatgagaatctaaagagagcaactggggtcaatgtaaacatctctgatctcaaatactgtgtaagtaaaaatgcatgataaactaatatctaatagatgtcgcggcctataagattttttttaaaatagcgaatatcagcaaaaaatttctaatattatttaaatactgattaaatactaaacatcaaaggaaattttaaaaaactactttgaggccaactgtactggctcatgcctataactgcagcactttgggaggctgagatgggaggattgtttgaggccaggagtttgagatcaggctaggcgacatagcaagactccatct[135 bp omitted]tctactaaaaaatacaaaaattagccagacatggtggtgcccctgtaatcccagctacttgggaggctgaggcaggagaatcacttgaatctgggaggtggaggttgcagtgagccaagattgcgccactgcactgcagcctgggcaagagtgagactctgtctcaaaaaaaaaaaagattattataacgtatatattcattatagtaaatactcatgaacggaaggaaaaatcatgcataatgttactgccaaaaaaacacttatgttaacaggattctaccttatgtagaaggattctaccttttatgttttttagatttgtattctcactgtgcatcatgtatattgaattttagacactttaaaattataacatgataatggccggcctcggtggctcacacctgtaatctcagtactttgggaggctgaggcaggcagatcaccagaggtcaggagttcgagactagcctggccaacatggcaaaactccgtctctactaaaaatacaaaaattagccgggcagacagatcacctgaggtcaggagttcgggaccgccctggccaacatggtgaaaccccatctctactaaaaatagaaaaattagccgggcatgttggcatgcgcctgtaatcccagctattcaggaggctgaggcaggagaatcgcttgaacccaggaggcgtaggttgcagtgacccgagatcgtgccattgcattccaggctggttgaaaagagcgagactccatctcaaaaaaaaaaaaaaaaaaaaaaagaaacattataagaaaaaaagaaaaaaaagagcaaggaaacataagagataaacatttttccacactttccatcgcccaggctggagtgcagtggcatgatctcggctcactgcaacctctgcctcccaggttcaagctagtctcctgcttc[134 bp omitted]tggcctcccaaagtgctgggattacaggtgtgagccaccacgcccagccttttccatgctttaaagaaaatagactttattttttagagacgtctgggtttacagcaaaattgagtggaaaatacagagttcccacataccagcacagttaccgcacagacacagagtcccccacttttaacatctgcaccagattggtacatatattgacacaatattaatgctcatagtccatagtttacattagggttcactcttgtacattctgtggttttggacaaatttataatgacatgtatccacaattatactattacacaaaatggttccactgctctaaacattctgtgttctgcctattcagtccccccttccctcatcccctgccaaccgctgatgtttttgctgtttccatagttttgtcttttccagaatgtcatatagttggaatcatactgtatttggcctttcagattccatactcatctttcataaacatttcaaatgactatagttattctcctgtgtggatatatagttatttttaaccattcttcgattgatggacattggattagttctaagttttcaccattgtagataacactgcactgaattttttttttttgagacagagtttcactctcgtcacccaggctggagtgcaatggcgcaatcttggctcactgcaacctccgcctcccgggttcaagaaattctcctgcctcagcccccccaaatagctgggattacaggcatgcgccaccacacctggctaatttttcgtatttagtagagacagggtttcaccatgttggtcaggctggtctcgaactcctggcctcaggtgatatgcctgcctcagcctcccaaagtgctgggattataggggtgagccactgcacccagcctgcactgaacagctttatgcataaagataaagctttctctatctttagctttttatatagttatttataaagatatataaatatttgtatttataaaagttatttatataacgttttctctattctaagattatttctctaaatatactcccagaagggaaattattgggtaaaagaacatttgccagctgggtgcggtagctcatgcctatagtcccagtgcttttggaggctgaggcttgccaaaagaaggcctcccaaaaggatggatccttctgaggatccactgagctcagacgatcaaggctacagtgaggtgtaattgtgctactgcactccggcccaggcaatagagtgataccctgtctcaaatataaaataaaataaaataaaataaaataatatttactagtattgagcattataattataccaaaatttgctaattaaattttaattaacatttcattaattattaattagtttaaagatctattaattgttagttatttttctttggttttcattgaattgtgtcaatgaaaaatgtattcctgacatttttctactgaaatctttgtatattattgtgaaaaggtctatattaaatagtacagatatattttttgtagatggcataagtaagtaatatggttaatttgctgttggggatgttctgctaagggtgcctagtaaagtgttttagtcttctgtatgttaaagaagcatatctttgtgtcttaatgtaacacataaaaatcttattattttttgagagttaacttttttttcaatcatatctttttaaaggagctcccaccttaccttggcaaactggatgtctcatttcaaagaggtaatattttttgtttgtggcttaaacatttgtgttgagaagcatatgtgtgttttcttgtcatagtaagttcttactaaaagtaactgacctctaagtttgttccctcaggcctacaaatctgaatacttgaaaattatctgacgtgaaattatcaggtccaaagagttaagtgattcattctgcttaaattcatgtacagttaacttaaacctgaacactgattgcaagaaacatttcacttctaaagcttcaaattctagaatattgccgcaacttatattagtcatccatcaaaaaatataataaaaaataaatgaaaagggctgggcacagtggctcacgactgtaatcccagcactttgggaggctgaggcgggcagatcactttaggtcaggagttcgagaccagcctagccaacatggcaaaaccccgtctctactaaaaatacaaaaaatattagctaggcatggtaatgcgcacctgtaatcccagctccatgggaggctgaggcaggagaatggcttgaacctgggaggcggaggttgcagtgagctgagattgcgccattgcactccagcctgggcaacaagagcgaaactctgtctcaaaaaaatatatataatgaaaataaagtaaataaataaataaataaatgaaaagaaatggaaaggacccctttcaaatcctttctggttccataatatttagttctgtcttttagctgctccatattttaaatgattaaacagacttctgtcattcaaataaaacatttcctagtcatcttcagttagctgttttcttctgagggaacatttctcacaaagaaacatgtcccttgacccaacttgttagttacttcagatgttagaatggaaaatataccaccttaaggtatgtgctgaacatatataggctccctcattgtcacaagtcagcctcacatttttgaatgattcaaatgtataactcaataaaaccaaaagatgttacatatcatgaatcttggtatgatttgtatatagttgaaaccttggttaaatgtcagctccatttatattaattttttaaaagaactataactgctccgtgaactagattttaaattggccaagccaggtgtggtgacgtacacctctagtcccagctacttgggagactgagttgggaggctcatttgagcccaagagttggagtctagcttgggctacatagcaagaccctgtctcttaaaaaaaaaaaaattgaccactgataggggaatttttgaaaatgaaataaaaatcagaaaaaatttaacattagctatttctaagggatatttaaacctcagatgtgtttgatttcaatttccaggtaagttgaagttgttggtttgaggaaacttttcttcattcttgtaacttatacgattatacttgccaaactattgtaatatttgtgtcaattttggacttgtgaaagttaagaaaatttcagaaatgaagtttttcctatttttcactttgtagagcaaagccaaagaaagccccataaaaatttaaaaatccagcagatgtggtggctcacacctataatctcagcactttgagaggccaaggcgggagggttgcttgagaccaacaggttgaaaccagcctgggcaacatagcaagaccccgtctctaaaaaaaatattagccagtcatggtggaatatgcctatagtctcagctatttaagagacttgaggtgggagaatcccttgagcccaggagttcaaggctacagtgagctatgctcacaccactatgctccagcctgggtgacagtgagaccttgtctcaaaaaaaaaaaaaaaaaaatcctttgaggaaaaaaaaagttttatttgttttcctgggtttgtatgtccctcagaaagtcatgaaactgttttttctttcttttgaggcagaatcttgctctgttgcccaggctggagtgaagtagctcaatctcagctcactgcaacctccacctcctgggttcaagggattctcatgcctcagccacctgaatagctgggattacaggtacccgccaccatacccgactaatttttgtatttttagtagagacgaggtttcaccacattggccaggctggtcttgaattgctggcctcaactgatttacctgacccccccttgccctcccaaaatgctaggattataagcatgagccaccacacctggccaatttttgaatgtgaagagacctttgagactgtctaatcttgtcttctgttatagacaaggaaattgaagtctaaagatgcaaattaacttaatcaatttcatataacaaggaaataacaatgctagaacttgaactaggtctctatcttagcagaccagtgttcagctgtaccatactccctctccattggaacactattcccaaatgttgtattaagaacaatgctgtgggtccagtgcagtggctcacgcctgtaatcccaacactttgggaggccgagacaggtggatcacctgaggttaggagttcgagaccagcctggccaacacggtgaaaccctgtttctactaaaaatacaaaaattagccgggcatggtgacatgcacctataatcccagctacttgggaggctgaggcaggggaatcacttcaacctgggaggcagaggttgcagtgagctgagatcacgccattgtactccagcctggacaacaagagcaagactgtgtctcaaaaaaaaaaagaacaatgctgtggaaaaaaaaaagaacaacactgtgtactgtcaagtttcagacatctgaaagaaataataataagctttcattttatattgcattcatctcatgtcataattgactttaggactgatcctcaaatgtgaagttgactgcatttggaacagactaataaaccgtgtgtaaaaacttgactcagaacaatggcagtggctcacatctgtaatcccagcactttgggaggctaaggcaggaggatcacttgatcccaggggttcgagaccagcctgggccacatacagagactccatctttacaaaaataataaaaataatattagccaggcatggtggtatgcacctgtgggcctacctagggaggctgaggtggggggattgctgagcccaggaggttgaggctgcagtgagccatgattgtgtcactgcacaaagtgagactcagtctcaaaaaaaaaaaaaaaaaaaagagaaaagaaaagaaaacaagaaacttgactcagattagtcaaaaagtggttccgttttttctatcct[132 bp omitted]gaaaccctgtctgtactaaaaatacaaaaatttttaaatttttattattgttttttgagatgagcttttgcttctgttgtccagtggcacaatctcagctcactgcaacctctgcctcccaggttcaagcaatcctcctgcctcggcctcctgtgtagctgggattacaggtgcccgccaccactcccagctaatttttgtatttttagtagagacgaggtttcaccttgttggccaggctagtcttgaattcctgacctcaggtgatccacccacatcagcgtcccaaagggctgggattagtcatgagccaccatgcctggccaaaatacaaaaattagccaattgtggtggtgcacacctgtagccccagctactcgggaggctgaggctggagaatcacttgaacccgggaggcagatgttgcagtgagcagagatcgtgccactgcactccagcctgggcaacagagcgagactgtctcaaaaaaaaaaatacgctgaattggcctggtgcggtggctcacgcctgtaatccttacactttgggaggttg[131 bp omitted]gcaggagaatcgctgaaacccaggaggtggagattgcagtgagccgagatcatgccactgcacttcagcctgggcaacagatcgagactgtctcaacaacaaaaaaaagtgttaaccaaatggtttgttattatctatcctgattatttgaaggtaacctttttttttcatggaaaacacaaaatttggataatctacagttgactataattattgttttaaagttccccaaatagtgaaaactatttaaatagtggcccctaacttgcataggggccactattccatcaaccaacacatcctatggcatactccttgtctatctttcctatttcctgttattttcctcttttctttttgtagtccaccacttcctagctggttatcttctgcctagaaaaatactggggcaaacttctctttttccaaatgtttttctacattctaagctggctgaggcatctaatttatgtattattatttttaagtagagatcaggtctcgctatgttggtcagattggtcttgaattcctggcctcaagcaatcttcccacctcagccttccaaagtgctgagattacaggagtgagccactgcacctggcctaatatttgtatctttacatcactatagcactttttttgcctcagcacacattttagttttctcattctctcgctgttagatagaatattcttatgtatttttttgctgttccaaagttagtttcatctgtttgacctttttgtaaactgattcttacatgcatcttacttgactgctaaattaattttttaatttgcccacaccgtgacaaaaaggcagtcttccttatgagcttcaagcgtgaagtcccggagaaagacactgattggcccagcttgggtcatgtggccatcctgaagaaaagaaatgggctattatgatcatatgcccatccccgagggtgaatggacagtgggtactgtggtgacagctctatcacaacaatgtgagatgtgaaatacaggtttccaaaggaaggaagaatgttgggtaggtaaaaaacatgctggataatgcctataatcccagcattcaaggaggccaaggtgagaggatcccttgaggccaagaattcaaggccaacctggcca[142 bp omitted]catggagaaaccccgtctctactaaaaatacaaaattagccaggcgtggtggcagatgcctgtaatcccagctactctggagactgaggcaggaaaatcacttgaacccgggaggcagaggttgcgatgagccgagatggcaccgctgcactgcagcctgggtgacagagtgagactccgtctcaaaaaaaaaaaaaaaaaaagaaaagccaagcgtggtggcacatgcctctaatctcagctatttggaggctgaggcaggaggatcactggagctgaggagttcaaggctgctgtgagctgtggtcatgctactgcactccagcctgggtgacagattgagaccctgtctcaaaatatatatacatatatatataagctatctactataaacataatttttagagtttaattatgtagcctatgataagtttaaactctttcagttataagtgttagatgcacatctcaagatagcttaagaaaaaaattaaaaatgaatatattggttttcataattagaaagtccaggggttatatgccctcagacatgactgattccagttgctcaagcagtaattggtctctctctatctccgtttcttgcttttgctttcatttgtgttagctttgcttttagggacaccctttccacagagatgaactcttggcagcttgtacatgatccgttcagcaaaggatttcaagaggcttctctcccagtgtccatattgttatgcttaacaggttagactggtcatatatttagtctgtggtcagagaggcagagccaatgattgacagtcccatcagagtaacccagagccccatcagaattacaagaagtatagtaacagacttttcctttttttcccctttaatgtacatgctgcttttcacacagggtataattataaataatttaattttctgacatggatttcatttactttttgataatgcatctttattttgatttgccatataataagacggaataaaggattttcaccattttgttatttgcagattagtggaattgaaggttcagacggaagcagaacaatttttacaatagttatatagtatgtatagtaaattatataaatgattagagtaattagagtcaaaagggactagagagccaggtgtggtggctcacacctgtaatcccagcacttagggaggctgaggcaggaggtttgcttgagatcagaagttcaagaccagcctgggcaaaatacagtgagaccctgtctctacaaaaaataaaataaacaataggccgggcacagtggctcacgcttgtaatcccagcactttgggaggccaaggctggtggatcaccgaacgccaggagtttgagaccatcctggccaacatggtgaaaccctgcctctactaaaaatacaaaaaattagccaggtgtggtgccgggcgcctgtaatcccagctacttaggaggctgaggcaggagaatcacttgaacctgggaggcggaggttgctgtgagccgagatcgcactatcgcactccagcctgggcaacaagaacgaaactccgtctcaaaaaaaaaaaaaaaaaaaatatatatatatatatatatatacgcgtatatatgtatatatatatatacgcgtatatatatatacgcgtatatatatatatatatatacacacgtatatatatatatatatacacacacacacacacacatatatatatatgggcgtggtggtgcatgcctgtagtgccagaggattgctggagtgtgggaggccgcagtgagccatcatcatgctactgcactccagccttggctatgagcaagatcctgtctcaaaaaaacaacaaaaaagggaccgggtacatggttcatgcctgtaatcccagcacttcgggaggccgaggcgggcagatcacttgagctcaggattttgagaccagcctggccaaatgcaaaaccccatctctacaaaaactacaaaaaaattagccgagcgtgatggtgctcctgtagttccagctactcaggaggtcaaggtgggaggatcacttgggcccaggaggcagaggttgcagtgagctgagatcgtgtcactgcactccagtctgggcgacagagtgagaccctgtctcaaacaaacaaacaaacaaaaaagagactagagaaagactaaagaaaataatcctcaggaaatataaagaacaattaaagtccccttctaattttttcattacttgaattttctttgaataactgcattcatataattcttcaacacattactgatttagtgtatacttcccttgcctgaatgttatttttaatctctgaaaaagtcaatgatgatatagcaaaactttagaaacaatctcagtatctactagtagggaaatggttaaattaaaataaattattgtatagctactcaatggagtattttgacatcttttaaaaaattatgatagaatcagatcggtggattgtatcaatgtcagtatcatggttgtgatattgtactatagatttgcaagaaggttaccactgggaaatctgggtaaagggtacatggaccctattatttcttacaattgattgtgaatctgtagttatctcaaaataaaaaattaataaatcataatcataagcacagtaaatcaacaggaaaatatttatttttatgtgaaaatatcaagttaaaatctgtagcacatcatattattagtatattaaatcatgcataggaaaaaagagtagagaaagtacaccagatggtcatagcatttatatctaagttgttggatttacatgatttttttcttctctatacttttccttattttataaatgtcctttaatgaatatatacaataccttctctagtcatcaaaaagtaaaacttatatttaaaaaatacatttaaaaatcttgctttctcagcatgccagtgtgaaggaaaagataaccgaattccattactgaaggaagtttttgaggcctttcctaacactcccattaacatcgatatcaaagtcaacaacaatgtgctgattaagaaggtactcaaggcattgcctcctctgggtgtgttgcatcctatttcacaaactaaataaggttagagtcagtgactgcatagattgataatgctcaaggaaatgtgataccctagggatcagcattgttttaaataatgccttagtagaagagatcattttactgtaggagagagcctattttcagagagagttggcatgtcatggataaaataaggttgtatgaaccaatcattctggcatttatgtaattatcttctagtttaacttgtttcattcatggttagtttatgtcaaattactaaataactctattctgttaaataaattatataatgatataatgtgaataaattttgcattttataaaatattctaaatttacatattgattcttccaaaagttatgctattcattcacagatagtcaattctaattcattttttaagtgaaatgttgttagtggatttgcaaataggcacatgcataaaattttgaattttcacacgtaggtttcagagttggtgaagcggtataatcgagaacacttaacagtgtggggtaatgccaattatgaaattgtagaaaagtgctacaaagaggtaagcttcaaaaatgatacagaattatctatctttgttgttgttttgtatctacaaatgataagttattatagtaataattttttttctttttcttatttttagagatagggtctcaccctgtcacccaggctggagtgcagtggtgcaatcatagctcactgcagcctcaaactcctgggctcaagtgatcctcctgcctcagcctctcaagtagctgggactacaggcacacaccactgcacccagctaatttttaaatctttagtagagatgaggtctcactatattgcccactctggtatcaaactcttggactcaagcaatcctcctgccttggcctcccaaagtggtgggattacaggtgtgagccattgtgcctgg[137 bp omitted]ggtgaaaccctgtctctatgaaaatataaaaattagttgggcatggtggcacgtgcctgtagtcccagctactcaggaggctgaggcagaagaatcacttgaacccgggaagcagaggttgcagtgagctgagatcatgccactgcactccagtctgggcaacagagcaagactctgtctcaaaaaaaacaaacaaacacttatcttatttcatagccttcatacacaggtagatggtactgggtggaagcaactagccagaagtttaatatagtagagataatggatttgaacctagcaatataaggtcaatgcagttgaactggttcaaggaattattattttcacatgctaatgttagttgcttaccaatatttcattatgtgtattaaaggaaaaaatacagtttctatcttttaatcactgtcttgtgttaggtaattaaattttttgtgtgtaattttgagttaaattatttagctgggcatgatgactcatgcctgtaatcctagcactttgggaggccaaagtgggaggattgcttgagcccaggtgtttgagaccagcctggacaacatagtgagaccccctttctattattattattattaattatttttaattttcttttgcctgtaacacagccctcaggagatcctgagaacatgtgcctattttttttttaagaaagaaattatttaaggggtgaagattgcttgaggccaggaatttgagaccagcctgggcaacatagtaa[269 bp omitted]aaaccccgtctgtactaaaaatacaaaaaattagccaggcgta[211 bp omitted]gggaggctgaggcaggagaattgcttgaacctggaaagcagaggttgcagtgagccgagatgtcaccagcctgggtgacagaacaagactccatctcaaaaaaaaaaaaaaagaaaggaaaagaaattatttagggtcaggctaagtggctcacacccctgtaatcccagcactttgggaggccaaggcggacagatcactttgagcccaggagtttgagaccagcctagggaacatgaggaaaccccatctctactaaaaatacaaaaactggctaggcatggtggcacatgcctgtagtctcagctacttgggaagctgaggtggaaggatggcttgagcctagtagacagaggttgcag[132 bp omitted]aaacttccaaatagatttaagcaagttaagccaagatcatgcaagatcatgattattaagcaagatataaaagcaggaccatctatctacccactgaaaattttctggttaaagaaaatatgtcggccaggcacagtggctcacgcttgtaatcccagcactttgggaggctgaggcgggtggatcacctgaggtcaggagtctgaagccagtctggccaacatggtgaaaccccatctctactaaaaatacaaaaattagccgggcatggtggtgcgcacctgtaatcccagcaactcaggaggctgaggcaggagaatggcttgaacccaggaggcagaggttgcaatgagctgggatcgcaccactgcactccagcctgggcaagagaccgagactcttctaaaaaaaaaagtgtataaaaattaattttatatgctttaaaatgatagttaaaccttcataatcaagtttacatacatcatcaggtaagagaatttgaaatttaagatgttaaaaaatcttgagcattgaagatgctgaaataatctgtaatatagaagaaatatcatgatgtaagtagcaattttcaaatacaaagaactctttggtggctgatctgagtgtaatggtgtttacaattaattgattacaaccagttacagatttctttatttctccactcccactgcttcatttgactagtcttaaaaaacaaagaaacaaaacaaacaacctctttgggcaagccttccttcctaacagagaaggcaaaaacatgcacagtcagcatcatcacaattcagagtataattgagattcccactaaagcaagtaagtttgttgtggttgttgttttggagactccaactcaggctggagtgcagttgcatgatttaggctcactgcaacctctgtctcctgggttcaagaggttctcctgcctcagactcccgactagctgggattgcaggtgcgtgctgccatgcccagctaatttttgtatctttagtagagatggggtttcgccatgttggccaggctggtctcgaactcctgacctcaagtgatctgcctgcctcggcctcccaaagtgctggtattacaagtgtaagccaccacacctggcctaaagcaagtatgttttatgtgcagcaggggctgagagatcccaaggtagctgtgtacaaaagggaagaacagagcaatcactggactgagtggctttagattcctaagaacttagaacttagactcttccataactcccagcaatcttaggcatttatcccagaaaaatgaaatacatgcttacaaaaacctataaatgattttttttaatttaatgatttattttattattattattattattatttaaaacaaggacttgctctgtcactgaggctggagtgcagtggtgtgatcttggttcactgcagccttgacttcctgggttcagatggtctcctgcctcagcctcctgtgtagcttggactacaggtgcatgccatcatgcctggcaaattttttgatttttttttgcagagacagggtctcactttgttgcccaggttgatcctgaattcctggcctcaagtgatcctcccacctcagccttttgagtagctgggactacaggtatgtaccaccatgcctggctaatttttaaattttttgtagagatggagtctcactgtattggccaagctggtctcaaactcctaggctcaagcaatcctcttgtctcgttttc[138 bp omitted]gcctca[216 bp omitted]ccatgtaaaatgaaggcacattccctaaaacctatacatgaatgtttatagcaactttattcatcaaagcaaaatcctgaaaataacctaaatgtccttcagtgggtaaatgactgaacaaactctgacatttccatacaatggaatattattcagcactaaaagggaatgaactattgatacatgcaacgaactggatggtcctcaaagacattatgcttagtgaaaaaaatcaacctcaaactgtattgtagattccattaactgtagcctggaagagcagatttaggggacagggacttagggtagggtagagagtgggtaccactacaagagatttcttgtgtagtgatgaaacggctttgtatcttggttttgtttttttttgttttttttttttgagactcactctgtcacccaggctggagtgcaatggtgcgatcttggctcactgcaacctccgccttccgggttcaagcgattttcccgcttcagcctcccgagtagctgggattacaggcgcccgccactaagcctgcctaatttttgtatttttagtagagatagggtttcaccatgttggtcaggctggtcacaaactcccgacctcaggtgatccgcccacctcggcctcccacagtgctgggattacaggcatgagccaccgtgcccggccacagctttgtatcttgattgcggtagtggttacatgaatctatacatgggttaaaactgcatagaactacacacacacaaatgaatgcggtgtttaaaaaatgatgaaaattgaataaattatgtagtctaatgaacagtaaggtaccaatgtcaattccaggtcttgatactatagtatagttacatcaagtgtcaccttttgaggaagctgggtgaaggccacatgggactatactatactacaggtatgtaccaccatgcctggctaattttgaaattttttgtagagatggagtctctctgtattgcccaggctggtctcaaactcctaggctcaagcaatcctcttgtctcattctcccaaagtgctgagattaagtctataattctttcaaaataaaaggctcacttttggcctgtaatcatagaacttttcccttgatttccatacttttccaaacatcacagtaaaaatgtctcaataaaatttgtctttcatattgccaacatactatataattgatacaacttttgcaattctttttttcctttccttttttttttttgagacggagtttcactctggttgcccaggctggagtgcaatggcgcaatctcggctcaccacaacctccacctcccgggttcaagcgattctcctccctc[213 bp omitted]taagaattttacatcagccttttaatttccagatgtaaacccaaaatataaacattaaaggaattggggcacacagtggtagtgggaaaatgtggcgcttaatgacttttcattcattcacacttaacgcagtggttctttcttttagtgctgtggttccaaagttgcataagtatttttaatttaattttattttattttatgttttgagacagaatgtcgctctgtcacccaggctggagtgcagtggtgcaatcttggctcaccgcaacctccgcctgctgggttcaagcaattctcctgtctcagcctcctgagtagctgggattacaggcacacgtcaccatgcctggctaatttttgtattttttagtagagaccgggtttctccatgttggtcaggctggtcttgaattcctgacctcagatgatccacccgcctcagcctcccaaagtgtcgggattacaggcatgagccactgtgcccagccaagtttttttttttgagacagagtctcactcttgcccacactggggtgcagtggcacgatctcagctcactgcaacctccacctcccaggttcaagcaattctcctgcctcagcctccagactagctgggattacaggtgcctgccatcacgcctggctaatttttgtattcttagtagagagagtttcatcatgttggccagactggtctcgaactcctgacctcaagtgatccacccgtcttggcctcccaaagtgctgggattacaagtgtgagtcaccgcacctggctgtaagttttgagggtcagcccctaaccctgttttcccataagctctgttatccttagtgtatgattttgcaaaactcaagattttgcagtgacttgtatattttgttacagctgaaacacctgtatgtaagtaagccaagaacattacaaagcaccatgtaaacaaaggggcaaaataaattctcaaacttatttactctattttttaaaaaaataaaggagtagataatttagaactatttatttatttatataattttttaatttgagacagagtctcactctgtcacctaggctgtagtgcagtggctcaatcttggctcactgcaagctccacctcctgggttcaagagattctcctgcctcagcctcccgagtagctggggttacagttgtacgccaccacgcccggctaatttttgtatttttagtagaggcaggatttcaccat[134 bp omitted]atttttaaaaatatatattatgtttttattaaaagttcactgtaagcataatttttttttccagtaaatatagcagggcctggcatggtagctcacgcttgtcattccagcactttgggaggctgaggtaggagaaatgcttgtgcccaggagttcaagaccagcctaggcaatataatgagattctgtctctacaaaaaatttttaaaaaattagctcggcatggtggtgcatgtctgtagtcccagctgtttgggagtctgaggtgtgggatcacttgagcctgggagatctaggcttcaatgagccatgatccagccactgtactctagcctgggtgacagcgagaccctgtctaatatatatatatctatatatagtacacataggagggcaaggagagagggaatggagatttgttatttaatggtataaagttggccaggcaaggtggctcacacctgtattcccagcactttgagaggctgaggcaggtggattgcttgagcccaggagttcgagaccagcctgggtgacatggtgaaacctcatatctacaaaaaataccaaaaaaagtagctgggcatggtggcacacacctgtagtcccatctattacaactcaggaggctgaggtgggagtattgcctgagccagggtcgaggatgcagtgagctttggttgtgccactgcactccagcctgggtgacagtgagaccttatctcaaaaaaaaaaaaaaaaaaaggcatagagttgttttcacttttgcaaaatgaaaagacttctggactttggttgcacaacagtgtgaatatacttaaaaccaccaaactgtacatttaaaaatgattgacattcaattttgctgggtggcggggggtgggggtggtgagaaaatagatttaaaaaatgattaagatcttaaatttggctggtgcggtggctcacacttgtaatcccaacactttgggaggccaaggtgggcagatcatctgaggtcaggagtttgagaccagcctggccaacatggtgaaaccacatctctactaaaactacaaaaaattagctgggcatggtggtgtgcgcctgtaatcttagctacttggggggctgaggcaggagaattgcttgaactcaggaggcagaggtttcagtgagccgatattgtgccactgcactccaacctgggtgacagagtgagactccgtctcaaaaaaaaaaaaaaaaaaatcttaaattttgtgttatgtgtattttagcacaattaaaattatatatatatgtatgtctatcttgtatttttaaagttttgggatattgagcatattttccaatagaaacttaaaatggtggttagattcttggattagtttacaaatcctatttatattttatatttgattcataacatagctaaaagatgacacatttgcaacagtattgatatgtatctatatatactcatatatagagatatatagctacatattttttaaacaggagtaaagttactgaatattccatatattcatcttttcattttgttccattggattctgacatgtttagtctttagctgtaagtactgtaaccaacgcagaagtggtattgcaaaagcagagacggtaatagagaaattttagtaacatcattatactatgaggctccaagatcaatcctgacccatttatcaaggactagccactattaagtgtggtgttatttgcaaatgaatattcataatcccaggaatgcttgtaatagatttcaacacattgtcttgggaaatactgagagttgtgaagtaatcctctttatttgagcagttgtaaaaataacatgtaatattgcttgtgtcttttagaattcagatattcctatactcttcagtctacaacgtgtcctgctcattcttggccttttcttcactggcctcttgccctttgtgcccattcgagaacagttttttgaaatcccaatgccttctattatactgaagtaagtggttacccttttattttaaaatcaattatcaattacagaaagactaagataaaagctcactaatatcaatatcaatgatgaagaagagatttctgtagtgatttccatgttctattacctgacctatattatgcatttttatataattaagacacattctctaaaacaaataatcaggacccatctcagattatgattttctgtgcctgtatagtcagaaatcagataaaaggaatttaatttaattacagaaggtaaataattattttattctcacatcaaatagcagttgccctccactttcccttattgctttctacttcattgacagctttacccagctcaaattccattaaactccaaattaaacaatggtattactgtaatacatttaggaagaaaaaaccaccaccaccataaaaacctctggagataggaaaataaaagggtatagttagtttatataggatactgtttttatagtggttttttgtttttttttttttgagatggagttttgctgttgtggcctaggctggggtgcaaaggtgtgatctcgactcactgcaacctctgcctcccgggttcaagtgattctcctgcctcagcctcccgagtagctgggattataggcgcccaccaccttgcctggctaatttttgtagttttagtagagatggggcttcaccatgttggtcaggctggtctccaactccttacctcagatgatccacccacctcctcccaaagtgctgggattataggcgtgacccgccttgcccagccaggatccttttatatttacgtaattccactactagaaaagccttgcatttcacttgctaatttactagcaagataaaaatacatagattgtaaaaatacataggtacataaaaacacttagattgcctgacaaatactaagcactcaagagtgatagcttttattgttatctttgttattataaagaatgatagcttcatctcaaaattctacacacgtagaatgtgatttctagctgtagattcataactgaattatggcaaaggaatttggaatcgttggggag[187 bp omitted]gtggtggcgggcgcctgtagtcccagctactccggaggctgagg[169 bp omitted]agagctttcctcttttatagcatgtctcaataaaggtaatgacttgggggaaaaaaataaagctgaacgttagtgtagcagtcatcagacaatattgctaagaaaagcaggccaggtgcagtggctcacgcctgtaatcccaacattttgggaggccgaggcaggaggatcacgaggtcaggagtttgagaccagcctggccaacatggtgaaaccccatctctactgaaaatacaaaaattagccaggctcgcctgaacacggggggcagaagttgcggtgagccaagatcgcgccactgcactccagcctgagcgacagagcgagactccttctcaaaaaaaaataagaaagaaaaacaattggccgggcgtggtggctcatgcctgtaatcccagcactgtgggaggc[134 bp omitted]gaggcaagagagtcgcttgaaccccagaggtggaggttgcagtgagtcgagatggctgcactctagcctgggcgacagagcaagactctgtctcaaaaaagaaaagaaaagaaaaacaatttagtcagtactcttgtgctcaacttctatttcatgcctgttttccaatttcagtatcttagtgataaacatgtttattttatttattcctaaattatatttatgaacatctttgtagctgtttctcagacaaaacaatagaaaacgcttcttgtctacccccccccccaaaaaacaccctattttatttgctagattaaaatgatccctaaacatttattcctggctgggccaggggctcctgcctgtaatctcagcactttgggaggcagaggcaggcggatcacctgaggtcgggagttccataccagcctggccaacatggtgaaactcccatctctactaaaaatacaaaattagctgggcatggtggcgcacatctgtaatcccagctactcaggaggctgaggcaggagaatcgcttgaacccagaaggtgggggttgcagtgagccgagatagcgccattgcactccagcctgggtgacagagcaagactctgccaataaataaataaataaaacatttattcctaaagtacttagctttcctctggcctggagtggactgtttgctctatatttatcttcatatgttccttttagaagcaaatattgttgaaatacagacataagaacaaactccacagaattaatattttctctaaaaagtgattatggattaagacacaagcaggatatattttgtgtgttttaatacttctatagaagacaatggatattttctaagacaatatagtgattgtttaatgaggtaatcagtatttgagctactaaatccctaatattcctgaaattgcaaccaggactttccactggggccagagttagggaaaaaaggacttgtactttattttgtacttttttttttttttgagacagagttttactttgtcacccaggctggagtgcagtggcgcagtcttggctcactgcaacctctgcctcctgggttcaagcagttctcctgtctccggctcctgagtagctgtgattacaggtgtgcgccaccatgcccggctaatttttatgtttttagtagagacgggggggggtttcactatgttggccaggctggtctggaacttctgaactcaggtgatgcaccagcctcagcctcccaaagtgctgggattacagacatgagccaccatgcctggcctacagatattttaaaggaaaggaaaacacgtggtaaactgctcactttgatctataatacagttccgttgtatgtttaaatttgccacatactaaattgtaggagacaaagcaggagaaagatttcaccaaaaaagaaacgagatatgagcctagggcaccagggtctctggaaagacaatatttatttatttatgtatgcatttatttatttatttatttatttattacttttgaatagggatggcaaaaagttagcttgagaccagtgcaaacagaacccaactggcctttattttatttttgtcctttttacaaatattttttgagaatatacaaagtacaaggcactgttttcatttttgaatttgtttcattttatcacactgatatatttctgtgtttctaatttgtaattcaaactttattttaccctaggctaaaagaaccacacaccatgtccagaagtcaaaagtttctcatctggctttctgatctgtaagaattttaatttcttaatatgcaagttattgcttcagctatatttattaaatactacccttaaaatgttgtgcaagctttccacatgtaatttgtaacaaggacaaattgagcacctgctatgtaaaatgtgtatgaatcatttagaaatatcttaattactaatcacaaaatcttaggaagaatcttgagagataatgtcctccaacttcatgagaaaactgagcccccatatacccagttaaattatttacttggggttatctagctagttagtagcagaactaggttaaataaccattccctttagcttacttgctggtgaaaagaagtgtagcaacacagtatatataaaagtgtatgttgcctacagcacatttctcagaaaaatttgctctgcaccaagacttaacagcagaaaggaaatcccacctatagagtggatatcaactttaaagtaaatgccttaatttagacatgatgagtttaattttagtaaaaatcactaaataattgtactatattttgctttaagatggaaccttgaatgcttaaatattttaatagtcccaaatcacaactttttattatttaacgccttttcttcttattttattttattttattttattttattttatttatttatttattcattttttgagatggagtctttctctgtcgcccaggctggagtgcagtggtgtgatctcggctcaccgcttcctgggttcaagtgattcttctgcctcagcctcccgagtagctggaactataggtgcctcccaccatgcctggttagtttttgtattttttagtagagatgaggtttcatcatgttggccaggctgatctcgaactcctggcctcatgtgatctgcccacctcagcctcccaaagtgctgggattacaggtgtgagccaccgcgcccagccttaacgcctttttcaaagagtcttaaacaattagttttatcttttctctctgtcagtgtttattcttttttgctttattcttgatttaagctctagttttcaaggatgccttttttttgtactcaagtaaaaccaggatgcattttttttcttttttcaaccctattaactgacaagatgcattgttaattggtgttaaaagcacatgatttctagtttctgttatttaatcattctaatagacataacagaatagaaataatgtctttccagtgcaatgaattcctatcttgctcaagaggtttgtattttgaaagttcacttatcagtgagttacttggaacaaaaaaatattttttccctagacataggatagtgtaattaatggacataatgcttctaacatcgcttacaaaagactaatccattgtgtaatgaactatgatgttatagaaattgacctgcatttgttgacttattttaacttggaaagttaggaacacacattaatagtaagaaaggaaagccagctctttctccttcttcagcagtgaaaatgaggcagcctcttttccattgagctgtgccaacaagaatgggtctcctatgaatctggtagcagcaagaagtagaaaggaggttctggttgtccaccaaccagcagcctgcagtgaaaggagatccagcaattaagacataaattaattcacaacagctattattacttgagaccatttcttttattgctgaagcattgggattaaattaaactggaattactaaactctaaattgactaaattaggactaaggactaaattcctaaatcagttttgctttttcttttctagcttactaatgaggaaagctttgtttgaccacctaactgctcgaggcattcaagtaagtttctggaatgatgcattttggaagcagcatagctcaccagtttaacacaaatataaagggcaagaacttttaactgacttagtttggcccttgactctgatgctgctgctttactgatccacaaatgaggaccttaagctcttccttacacttagcaataaagcattggcatttctggatctagattcctcttatgtacagaatagctgatgccagaggggtgggacagtgtttgtgtgtgtgtatatatatataaatatatgtatgtatatttctttttttacttttttcttttttttttttgagatggagtctcactctgtcacccaggctggagtgcagtggtgcagtcttgactcactgcaacctccacctcccaggttcaagcaattctcatgcctcagcctcctaagtagctgggattataggcatgcaccaccatacctggctaatttttgtatttttagtagagactgggttttgccatgttggccaggctgatctcgaactccggacctcaggtgatctgcctgccttggcctcccaaagtgctggaattacaggcgtgagccaccgcgctcagccaggagtctgtatatttaacaagcaccatgaatttttttttaacactcctcattcctgtaaggaacaaagtggaattttaaaaaaggatctaatgatttatttaaatgatagctttaaaaggttatttctaaatgtaccaagactgtagtggataaatactgttataaaaataattttctattttaacatttcttctcatacttctcacacttctaattttcaggtgtatatttgggtattaaatgaagaacaagaatacaaaagagcttttgatttgggagcaactggggtgatgacagactatccaacaaagcttagggattttttacataacttttcagcatagaaaaagaggtacttagaagtattgaaggaaaaaatgaagacctaagaaaaaaatatttcatgatcatttccctaagccatttccagaatggtaaaaggtttaatcagtttttattacctcatttttaagcctgtatgagaatgtagaaactatatattatatgtatatttattttaaataatattgtatattttatgtttgtaaattgtttagaaagataattggttatgagatgtaagttttaatttcttaatgtgcatttttgtttctagatcttatacagaaatcttgattaataacatacacagaaatgtacatactacatcatctacagaaatcttgatcaataacctagaaactaggttatctaggttattgatcaagatttctgtagatgatgcagtgttctatcataagtaattctggaatcaaagactattggatacatttggcattgggctgagtgtggtggctcatgcctgtaatcccagcactttgggaggctgagacaggcggatcatctgaagtcaggagttaaagaccagcctggccaacatggcaaaaccccatctctaccaaaaatacaaaaattaaccatgcgtggtggtacacgtctgtcatcccagcagctcttaaggctgaggcacaagaattgcttgaacccgggaggcagaggctgtagtgagccaagatagcaccactgcactccagcctgggagacagagtgagac[175 bp omitted]agtcaggagaatggcgtgaacccgggaggcggagcttgcagtgagccgagatcgcgccactgcactccagcctgggctacagagcaagactccgtctcaaaaaaagaaaaaaagaaaaaaaattggcaatagtcttcactggaatacaatcaattagtaaaagattttttttttttttttgacatgtagtcttgctctgtcgccgaggccggagtgcagtggtgcgatcttggctcactgcaacctctgcctcccaggttccagcaattctcctgcctctgcctcccgagtacctgggattacaggtgcctgctaccatgcccagctaatttttgtatttttagtagagacagggttttgccacgttggccagactggtctcgaactcctgacctcaggtgatccacccacctcggcctctcaaagtgctgggattacaggtttgaaccactgcacccggccagtaaaagaaattttgaaggccattgcagctatttggtagtgtcttgttatttctaggtgtaccttagttaaagaggaaaaataaaacggaaaaaagcttggaaatcagtgatgtgtagttatttggcaagttatacataatcagcagcagccaggctcaagaaaataaaagttgattagttgatcagaaataaaatctgtagagtgaattagatttctgagttgttgttgttaatggaacattctatttgagacctttttcaggtgtgtagcaattctaccatgtccatttttttaagcattaaaaaggaacttaccagttgtaaattaagacaagatccaaatagtcatatttttgtgtttcctctaaaaaaatgtaagatttccatttttggcactgactaactgagcctacatctagattttaaataccatcttgaatcctaataattaaactgatgaaagtgcatatcattgttcctaacatttatgaacccccataaagatgttcctgatctttaaaactcattaatctgagtattaagtagaaacagaattttccaaagcattagacatcactttctcagtttatctgaggtgacttcgtgtacatctgtttctaatatatttgactaattttcatgatctcagattgtgaggtaaatgtaatctggaataataagtgtcttttacctagattacatctctcatttggagtttggcaatgaaactgctatgaagaatgactgtactctcctatctgtccctggatgacataaatatcatttgctttgttgtttaaactgaaataaagttttccaagaacaaagtaagcattcttcattctttttcagttttaattccaaatatactttatagatttttttgcagaatttaatgaggtgatgctttaatcatatgaataataaatgcacctgagatttctctctagtaaagaaaagaaaatatggaaacacttttatggtaagaaagttacttcttggcatttgaacaaataacttgggagggtaatccactgaatcagtcattttcaatttcacttattgtaacttatggttatagttgctagggatcattttgatcatctttgatagaattctttttgttatttctcctttctaaattttgctttgttatgattcagaacagatcatattaaagggccagcttatattttatgtaaaccagtagaagaaaaagtacccaacaaggtaaagatgtttagaaaataatgtttcaaaagtttggtgattttatagtcaaggtgactttaattttcttaataaaaacatagtattttctaacaaggaagttggtcatcattcagttaacatctgaattctgctttttgataggggcatcaagttttttgtttgtttgtttgtttgttttttgagacagggtcttgctctgccacccaggctggagtgcagtggctcagtctccactcactgtagccccaacctccctggctccagtgatactcctacctcagcctcctgagtagctgccagtacaggagtacaccaccacaccctgctaatttttgtatttttttgtagagacagggttgctccatgttgcccatggctcaagcaatctgcccgacttggcctcccaaagtgctgggattacaggcacgagccactgcgcccggcctcagaatttcttaaagctctcatttcagttctagaaattgaggagtggggagggactacagggagtcatctcatagccacactgtgaagaaaggatggctgtgatgggttgagaaaacagaacataaataataaatcatagtatgctccagtatgggaaaccattaatatataacacagcctgaatgattttgcctagagttatgcaaaatggtgaccccagaaagaatccattggaaaaaaaaaaatcaaaagagattctgcaatagataagaatgacaagttaagggtggccatgaatgccaggctgaagagtttgttctaaactgaaagtcatacagctcaagtagatggctaaacttgagacaatggaaacaagaaccaaaactgctaggcaataatatgacataatgatttcagacacaaaagaaaaatgtgaaaaacagtctgcaaccaggcctcaaaacaaaagcagaactaaagaagtcagatgcaagcgtcagagaggaaatcaaaatgctcggagcatacgaagacattttctgtgcctcatttaggtagcgctgaaaaattaatgtttggaaagttgatcatcctataatctgaaagaaagatacaagcctagagcagagaactgtccagaaaccaggtcagaagtctaaacagattaatacaaatctaaattgccattagatggcataaaaatttggtggccaggtgcagtggctcacgtctgtaatcccagcactttgggaggctgaggcagggagatcacttgaggccaggagttcgagaccagcctggccaacatggcaaaaccccatctctactaaaaaaaaaaaaaaaaaaaaaaattagccaggtgtggtggtgcacacctgtaatcccaactacttgggattacacgagaattgaggcaggagaattgcctgaatccaggaggcggaagctgcagtgagctgagatggcactgctgcactccaccctggccaacagagtgagactccatctcaaaataaaaaagaagaggccgggtgcagtggctcatgcctgtaatcccagcactttgggaggctgaggcgggcagatcacgaagtcagaagattcaagaccatcctggctaacacggtgaaaccccttctctactaaaaatacaaaaaattagctgggcgtggtagcacgtgcctgtagtcccagctacttgggaggctgaggcaggagaatcacttgaacccgggaggcagaggttgcagtgagccaagattgtgccactgtactgcagcctgggcgacagagcaagactccatctcaaataaaaaaaaaaaaaaaaggaagtaatggta[147 bp omitted]catggtgaaaccctgtctgtactaaaaatacaaaaattatcaggatgtggtggtgggtgtctgtaatcccagctactctggaggctgaggcaggagaatcacttgaacccgggaagtggaggttgcagtgagctgagaccatgccattgcactccagctgggcaaaaagagtgaaattctgtctcaataaataaaagttaaaagagggaagaaataataagagctggcgactggataagcttaaaagaagaagggaaagttacaaagctgcaaaaaaatggggaacctggagaggagaaacaatgtggtggtaaagatgatgaatgtgggcgcacttgagtttgaaagggcaaaaagaagtttgagtggctatgctttagatatattcgcccttggatgaaaggctaaatctggaggaatagatttaggcatttcctgtacttcacaggtatgaatttgcaaagttagctctttagaggtgatattagttgcttctcagtatactacttgcagtttgaatagtaccatgccaccagatgcctagttcgtgaatgcctagtgagactgaataataacatacaacataacaaatgatctcattcatttatgcctttttctttcaaaagtagagagctctattaaaacagacataattttttttttttttgagatggagtcttactctgtctcccaggctggagtgcaatggtgcaatcttggctcactgcaacctctgctctcgggttcaagcgattctcttgcttcagcctcccaagtagctgggactacaggcacatgccaccacacccagctaatttttgtacttttagtggagatgcactttc[136 bp omitted]atgaaaagaatacattattctggtttgttgagtagtttttaaatttagttttttaaagtcctaagataacaaggcaggtcctggacagcctctcctgggcaagaggaggctgagcaggtgtagcaggttacccattcccactttgatgagagctgctccacttttttctgtttcatatatgagttcaacataaaattgatttgaaataggaattatctgcaaaaaccttttttgcattctttgttctaagatttttccctccggactttaatagaacctccctctctcccctcctcttcctctctttcttcttccctcccttccttccctgataactcactcaaagccttttaaaaattcagtcagttcccttaatggtttatgattatttttttctggtcagaaacttctcaagaacaaccaataggtggggaaggaggggtgagagacaggcataggatatgaacagctaattcacaagtgtaaatggccaagagacatgaaaaatgtttaacttccctcataataaaagacttacaaaatgaaatgatattgaatatgatactaattcccgactctcaggtaagcaagaatgaaagtgttgatgagaggcataggagaacaagcactcataaactgttggtaggaatataaattgacaaagcccacgcctcctcccccacttttttttttttaagacaaagtcttgctctgttgcagactgaagtgcagtggcatgatcacagctcactgcaacctgtgcctcctggaatcaaacaatccttccaccgcagacccctgagtagctgggactacaggtatgtaccaccacgccagctaatttttgtatttttttgtagagacagggttttgctatgttgcccaggctggtcttaaactcctgggctcaagccatctgctcacctcagcctcacaaagtgttgggaatataggtgtgagctacaacacttggccttggcagaacacttctaggataaatttgacagtaccttcaaatacatcctttcatcagaaattccagtgctaggaataatattccaagaaaaaaataggatgagtgtccaaagatacatatgcagagtgaaaaattggaaacaacctaaatatacaacattaaaggactggttaggccaggcatggtgggtcacacttgtaatcccagcacttggggaggcca[133 bp omitted]agtcaccagaatcacttgaacctcccgggagacggaggttgcagtgagccaagatcacaccagtgcactccagcctggctgacagaattagacttcatctcaaacaaaacaaaacaaaaaacagtgagggaggccgggcgtggtggctcatgcctgtaatcccagcactttgggaggcca[135 bp omitted]gaggctgagacaggagaatcgcttgaacctgggaggtagaagttgcagtgaaccgagattgcaccactgcactccagcctgggtgacacagcgaggctctgtctcaaaaaaataaaaaaacagcaacgaaacagtgagggaggccgtgcattccattccaaggcatctgtgagcccacagagcagacaccatgagcaaacctcattctccccagttgaaaaaatttatgaacaagaaattatcattgaaattaaatgatggcagacatattgtgaagatttgatccctttatgaatcttgtgatagatgaatgtgtggagatggcgactagtaggcaacagaacaatattggaatggacgtaatatgaggaaatagtatcgtcatgttagaagccttggaatgagtaaaaataatggctgttcagcagagaaacctatgccctctctctataggtcctgttttactatgatgtaaaaattaggtcatgtacattttcacattagacttttttttttttttttttttttttttttttttttttttttttgcgaaggagtcttgctctgttgcccaggctggatctcagctcactgcaagctctgcctcagcctcccgagtagctgggactacaggcacccgccaccatgccccgcctttttt[219 bp omitted]gaggcaggagaatggcgtgaacccgggaggcggagcttgcagtgagccgagatccagtctgggctacagagcaagactccgtctcaaaaaaataaaaataaaaataaaaaaacaaaatcgcaaaacaagggactggttaaataaattatgatagatccttgtaaaatatgaatgttctatatctagtgatatgagaatattaagtgaaaacactaagccacaaaattgtgtattgtgtaaataaaaaatattcatcttaaaggtctgaaatgctatctgccaatgttaatagtgtttttttttaattgtggtaagaaggctgggcgcggtggctcacgccattattcccagcaatttgggaggccgaggcaggtggattacctgaggtcaggagtttgagaccagcctggccaacgtggtgaaatgccgtctttacaaaaatacaagaattagccgggcatgatggtaggtgcctgtaatcccagctactcaggaggcggaggtgggagaatcgcttgaacccgggaggcggagtttgcagtgagccaagattgtgccactgcactccagcctgggcaacagagcgagactctgtctcaaaaaaataaatatataaatacagaaaaaaataagatgaaatcattcaactcagttgtgatttcacaagtcatcaacaaaagagttaatcattgaaattaagagaaaaagctgaaggaagagttcagtaggaaaaagaatgacccagaaagtcaagtttggaatatgctcaagggagagaaggtgtggtctgagaaatagaagcaagggagagtatgttttcaaccccatgaaaacagaatttaagagaaaaggtaggctgggcgcggtggctcaagcctgtaatcccagcactttgagaggctgaagtgggtggatcatttgaggtcaggagttcgagaccagcctgaccaacatggtgaaacctggtctctactgaaaatacaaaaaattagccggtgtggtggtgcacatctgtaattccagcttcttgggaggctgtggcatgagaattgcttgaactcaggaggttgcagtgagctgagatcgtgcgactgcactccatcctgggcgacagagcaagactccatctcaaaaaaagaaagaaagaaggtgattatcatcaatgcccaaaagagaatactgagattaagggccagaaaagggataactgcgttttttttgtttttttttttttgagatagagtttctctctgtcacccaggctggagtgccgtgccatcctcatggcttactacagccttgacctcctaggcttaagcgaccctcccacttcaacctttagagtagctgagactacaggcttgcgccatgacgcctggctgatttttgtattgtttgtagagatgaggtttcgccatgctgcccaggctggtctcaaactcctgagcaatccacactccttggcctcccaaagtgctgggtttacaggcatgagccaccgcacctggcctgcatttgtttcaaaaggaggcctctgtaactatgattcaattatctctatagttgatggaactgatatgagactgcaaaggaatcaagaggactgaattatactaaatgaggctagtaaaaatcagccacttattcacaggaattagaaaatcaagacatctgaaagggcagcagtatcaagtgagttgtgttctatgtgggaggcttataaatgtgtgaaaacaagaaggagctagtggagagattggagatattggagagagaggacatgtgagcaatgatcgcttcaagactgtgtggcttgtaatttattcaacgaatccttagattcgctgaatgcctgccttgccaagcacctgtgaatcatactgaacatttcctgcccttggtacttatggtctagttaagttatccagagctgagagaaggaagaggtatcttttttatacatactt[145 bp omitted]accccatctctactaaaaatacaaaattagtcaggcgtggtggtgcaggcctgtaatcccagctactcgggagcctgaagcaggagaattgcttgaacctggaggtggaggttgcagtgagccaagattgtgccatctgcactccagcctggccaaaaagagcaaaactccatctcaaaaaaaaaaaaaaaaaaaaagaaagactgggatgatttgcacttgaaagaggataaagtagtaaagccaactagtgtggtctgttactcttcttataggacatcagtcctataggattagggcccgcccttatgacttcacttaaccttaatacctgctgaagactcagtcttcaaatacagtcacactgggggtcagggcttacacatatgaatttggtgggggaggggggcgtggggggcacaatttagttcataacaggtggggatgggggtcaaagcagagagctggagattggttatgtgcgagaggaggcagagatgggaaggggaaaaggcagcacttgcagctgaccacagaagggctaggagagagaagaaatctagtgtagccagggattgtcagaaagaggttgtgtatttctttgtttccttggatacctacttggagatttagagtattgataacaaacaatctagatcactagggggaggaaataaacttttcaaaggtttaaattctttattttgagacagagtctcactctgtcaccgaggctgaagtgcagtggcatgatctcggctcactgcaacctccacctcccaggttcaagtgattgtcctgcctcagcctcccgagtaggtggaattacaggcatgcaccaccatgccctgctaatttttgtatttttagtagagacagggtttcaccatgttggccaggctggtcttgaactcccgacctcaagtgatccacccacctcggcctcccaaagtgctgggattacagacttgagccaccacacccagcctcaaatgtttaaattctgattaatttgaggaatagtgaatttgaaagtttgggcattgttaaaaaacggtaaatgttacatttatgtgaagtttaaatttttcttcacatttacatgtattcctgtgtttcttactacaacctggtagagcagttgagattatcaccttcctgttttttatatgaaactgtgagttagatgataccttcaaagggaatttacagggtcacctggctagaagtgatgtggttgggtctccttaaccttccaactcactctcacttttctaatttttcttccattcaccattcaatgctgagagaaacgtaaaaagccgggagaaagggcagttgcaatgttatgctatagaaagtaaactttccaaataaaagctacaaaacagaaaattcccatatgccaaatgtacttactgttcccttacttaaacactattaatagcatttgtggagataggaatcaagctactattcccatgaataactgaaaccattgcctgtgggaacagatggaaaactataccactacctttttgagaaattaagaaatcccaggtaagaacaaagtaatattaaacatttgtcattcaacactcagaattggtttggcttatacaactagatagatgaatagtggggtcacttactgagatggagaaaactgagaaggaaacagatttccaatgggaatgtgaaacattctgattcaattcacattttgagaaacattatccatcacttctcagccttttggctaagatcaagtgagaaacatcccaagcccaagtatgcataccttaggctcaacaaaatgactagacaacttcaaccctactttgaaggaaggaattcagttaacctttatttagtaccttttgtatgccaggttgctatcacactcatcatcttatttaatcttcaccatagtgttacgagataagtagtattatttctgatttatagatggggaaatagaagctcagatgggttgagagactcacgaaaaattgcacagatagtaagatgacaaacctggcattcaaacccatctattttttttttttttcgagacggagtttttgctcttgtcgcccaggctgggatgctgtggcacaatctcggctcactgcaacctccgcctcccaggttcaagtgattctcctgcctc[134 bp omitted]ccgcctcccaaagtcctgggattacaggcgtgcgccaccgtccccagcctttaatcctaaatcttgagagagcaagttcaaagctgtttttaacacaagcgctgctattctttctccgtaacctttgtcactgaacttcttaaataatactttggaaagagtgtcgtaaaagaaataaaatttggctgaatgcagtggcttatgcctataatcccagtactttgggaggccgaggcaggagggctgcttaaggccagga[141 bp omitted]ctgcctcccgggttcaagtgattctcctgcctcagcctcccaagtagctgggactacaggcacatgccatcatgcctggctaattttgtatttttagtagagaaggggtttcaccgtgttggtcaggctggtctcgaactcctgaccttgtgatccacccgcctcagcctcccaaagtgctgggattgaaggcataagccaccgtgcccagcctctctacaaaaaaatttttaattagcagggcatggtggtgcacacctgtagtcgtagctactcgggaggctgaggaaggaggatcacttgagtcaaggagtttgaggctgcggtcagctatgatcatgtcactacactccggcctgggcaactctcttaaaaaaaaggaaaaaagaaaattaactctcatgtgattgttttcctttctcttccaagtaagattttggattaaatacactaacgtttgatgcttaatgtttaatattaacgttgatgtctaatacaactgctgtatggtgttatggagagaatttttttcacttcttcattctaaccattttcatcatatttatgaaagaaagaaatttgaatttttaaaaatacaggcatttcaccttttctgtcttctgttctcttggaggccaaatagtaaaatttactgatgatgagtctatagttgtgtctacttatgcggaaagtacagatgaactatataatccttcacaagttctttcctaacccttctctttctctttttttatttttaatgtttttaaacaagatctcactctgtcacccaggttggagtgcagtggcaccatcataactcactgcaaccttgacctcccaggcccaagtgatcctcctgccttggctaattttttgttgcatttttttgtagagacagggtctccctatgttgtccaggctggtctcaaactcctgggttcaagcaatcctcctgcctcggcctcctaaagtgctgggattagaggcatgagtcaccatgcccaaccaacacccttctcctctgtggctgattcatttccctttttgatggatatgcctgcagtcatcattttttaggtcatgtgattctgaaataagaaacatttaggcacttttgcaaaatataacaggatgcacctggtcctactgatcactaagaacaatccaaatttaacctatcagaaacttaagataaatgatatcctcttagaagaaagaaacctcttgactcagatgaggaaagctgagaagtatgacatttccctagggaaaatattatagttttctaaattcattcatttttggaataacttctcccaaataacttgttttttaaagttattacaaccactcacacctataagaatggctactattttaaaaatacaaaaacaggccaggctctatggctcatgcctgtaatcccagtgctttaggaggctaaggctcgaggccaagagttccataacagcctgggcaacacagcgagactccaggtcttaacaaattttttttttttgattagccaggcatctacagtgagtcatgattgtgccactgaactccggcctgggcaacagagatcctgtccccaaaagaaaaaaaaaggtcaaaataaatttgataaacttatgtgtaaactggccaactgatatttacacacacacacacacacacacacacacacatatatatatatatatatatttttttttttttttgagacagactctgtttcccaggctggagtgcagtggtgcaatcttggctcactgaaacctctgctttctggattcaagcactcctcatgcctcagcctcccaagtagctggaattacaggtgtgtgtcaccacactgggctaatttttgtatttttagtagagacaagggtttca[137 bp omitted]taaggcatgtaatcccagaactttgagatgccaaggcaggaggatggcttgagcctagcagtttgagactagccttagcgacatagggagaccccatctctacaaacaaaacaaaacaaatctcaaatggaacaaagatttaaatatcaagaaaatgaaacaataaaaattcttttaaaaaataggctgataggccgggcaaggtggctcacgcctgtaatccagcactttgtgaggccaaggtgggtggatcacttgaggttagagagttggagaccagcctggccaacatggtgaaaacccgtctctactaaaaatacaaaaattagcccggcgtagtggcacacacctgtaatccaagctactcgggaggctgaggcaggagaattgcttgagaccggaaaacggaggttgcagttaaccaagatggtgccactgcactctagcctggccgacagagcgagactctgactcaaaaaaaaattaggctgatggccgtgtgtggtggcccatgcctgtaatcccagaactttgggaggttgaggcaggaggatcacctgaggttgggagttcaagagcagcctggccaacgtagtgaaatcccgtctctactaaaaatacaaatattagtcgtatgtggtggtgcacacctgtaatcccagctactcgggaggctgaggcaggagaattgcttgaacctgggaggtggaggttgcagtgagccgagatcatgccactgcactccaacctgggcgacagagctagactctgtctcaaaaaaaaaaaaaaaatacgctcaattggccaggcacggtggctcccacctgtaattctcacactttgggaggccaaggcaggaggatcacctgaggtcaagagtttgagaccagcctggccaacatggtgaaaccctgtctctactaaaaatacaaaaattagccgggtgtggtggtgtgtaccggtagtcccagctactcgggacactgaggcagcagaatcgcttgaacccaggaggcggaggttgcagtgagtcgagatcgtgccactgccctccagcctgggcgacagagcgaaactccatctcaaaatcagtcaatcaatcaatcaatcaataaaataaccagcagtctttgaaaaacactttgaggagaaagaactttgactccaggggaggagagcaaggttgtaaacacggctctgctcatactggcccagtcctatctgatgttgtccaacccaataatctggagtcaaaaataaatcttccagatcttctagttgagacttaactaaataagagctgtatttgcccttggatacaagtacaaagagggggcctagggccactagatttttcaggtctctaatcctgaggttgagcaaagctatcaagggttgctgcttcagtttccttaaggtaatcagaggccaagacctctgagttcccttagtatttgttgatcattatcgggcgtggcaggataataggataataatggagagaaagtcagaaggtaaacacgtgaacaaatgtctctgcatcataaacaaggtaaagaaaaaagtgctgtgctttggatgtgcatatacataaacatctcaatgccttaaggagcagtattactgccagcatgtcccacctccagccctaaggcggttttcccctatctcggtaaatggaatatacaatcggcttttcaccgagatattccattgcccagggacaagcaggagacagaagccttcctcttatctcaactgcaaagaggcgttccttcctcttttactaatcttcctcagcacagaccctttacgggtgttgggctgggggatggtcaggtctttcccttcccacgaggccatatttcagactatcacatggagagaaaccttgaacaatacctggtctctttcctaggcagaggtccctgcggccttccgcagtgttttgtgtatctgggtacttgagattagggagtggtttgagattagggagtggtgatgactcttaacgagcatgctgccttcaagcatttgtttaacaaagcacaccctgcacagccatttaaccctgagttaacacagcacgtgtttcaggaagcacagggttgggggtaggtttacagattaacagcatctcaaggcagaaaaatgtttcatagtacagaacaaaatggagtctcctatgtctacttctttctacacagacacagtaacaatctgatctctctttcttttccccacaatcttctggaatcatatgttgtatgaattatatctttttttttttttcctttctgagacggagtttcactcttgttgcccaggctggagtgtgcaatggctcaatcttggctcactgcaacctctgcctcccaggttcaagcgattctcctgcctcagc[133 bp omitted]cggccttccaaagtgctgggattacaggtgtgagccaccatgcccggcctgtatgaattacatcttaatctataaatatttgaatctcctgtatgtccaaaaatatcataagtcaaaagacagggaaaaatattgcagcacatttgatagttcataaaagtgaagaaggaactgatgaacaatccaaaaataatacaggaggccaggagtggtggctcatgcctgtaatcctagc[134 bp omitted]attacttgaacccaggaggcagaggctgcagcgagccgagattgcgccactgctctccagcctgggcaacagagtgagactctgtgtcaaaaaaaaaaaaaaaaaaaaaagtaataggggaaaataatataaataggcaagttagtgagaaaaacttctaaaataaatctcttgttataaaccaaaactttttcagttctaggaaatcaaatatgaaaaagaaaaaaatatatatataccaaaagttttgagggcagttaatcttcagaatgtgtacttactgcttctcttcctcagagcttccaggcttacttagtcctgtaattgccccatatctttgccattttacagcctggtttgtttatttgttttgagaccagatctcactctattgcctaggctggagttcagtggcatgagcatagttcactgtagcctcaaactcctgatcttaagtgatcctcccacctcagcctcctgaatagctgggactacaggcacacgccatcatgcccagctagtttttcttcttttttgtagagatggggggtcttgctatgttgcccaagctggtcttgatctcctggcctcaaatgatcctcctgccttggcctcccaaagtgctgcaattataggtatgtgccactacacctggccagtctggtcagtttaattaattggaaccttgagttaatgagatgttggtatgactttgatccacattacaatttgtcacctcttgctgagaagaactgttccatatcactgaactctggcaatctgccttcacaaacgtgtgccattattcacaggaaaccagagagaaatggtgcagctggctcattgtaaactgttgagaaaatctgaagcacaatatccaactgatattgtcagtaaaatcatcttcaaaataaaaggtatcatattggagtgactttttccctcaatgtgcacatccaattttcattagtttagtaaacacatatggaatgtctaa[131 bp omitted]cttccaggttcaagtgattctcctccctcagcctcccaaatagctgggattacaggcatacaccaccatgcctggctaatttttgtatttttagtagagatggggtttcaccatgttggccaggctggtctcgaactcctgacctcaggtgatcctcctgccttggcctcccaaagtgctgggattacaggcatgagccaccatgcccggccagaaagccatattttagaagaaaagacttagaataagagcttaatggcctaaggacagtttctaacttgtcatcttatatttagttactaacctactattaatccataagttatactgaaagtagctgtgtaagaactaatatttatatagtgaattattccttcaagcaacattaagtgtcttctgtgtaccaggcactgtcctagaggttgaagattttataaagtataagatgcagtccctacttgcaagggattgatgggcaattacactttgcaaggcattatatatattacc[141 bp omitted]ggaaactccatctctattaaaaatacaaaaattagccgggaatggtggcacatgtctataatcccaactactcaggaggctgaggcaggagaatcgcttgaacccgggaggcagaggttgcagtgagtcaagatggcaccattgtactccggctgggcaacaagagcaaaactccgtctcaaataaataaataaatacataaacagagaaatacagcctcagagttccaagaattgctcaaggttgatcatcaaataaatcacagagtggagttttctgatgacatagctcatgatatatacaacaaggattaatattttgtacctaaatttagagagagcctggagctctgatttctttctctatatctccttccctttttatgctagacataaggaaaattttattctgatagttaagtacatttgtacttgatatttttgagaactggtggtgttctggctatttctctcttgagactacttaggcaacaatcttaaaaagattttaaatgatatcataaaactccaaagtatttttgttgaaatttctgtgtcacaaaactgaagtacgcattattcagtagagcagagatttcttacatttttctgtttgtctaaaatatgtagagcaggtatataaattccactttcctttgggtactgcagtgacgtacagaaagaccttttattacaccgagcttctggagcgccagaaactcatcttatccacctctatttccatctttcccaacctggcaaaatgcatatgaggcacatggcagatgctcattaaaacttgaagtggaaaagagcaagaaaagagaaactgagttatggaaagtctctttttgggtggacaacaacaacagaattcttcagggttaatatttcagataatttaattagtcccatatttgcaattagaagaaatagctaagaaatctatgaacttccttcagtgtttag[134 bp omitted]gaggcaggagaatggcgtgaaccccggggggcggagcttgcagtgagccgagatcgcgccactacactccagcctgggtgaaagagtgagactccgtctcaaaaaaaaaaaaaaaaagaaaaagaaaaagaaaatagcttcctttgagtaagagcactctggtttttattgtggtttggtttggtttggtttggtttg[132 bp omitted]ttaatgaaacccctgtctctactaaaaatacaaaaaatagccaggtgtggtggtgggcacctgtagttccagctagtccggaggttgaggcatgaggattgcttgaacccaggaggcggaggttgcagtaagccaggatcaagccactgcactccagcctgggcgacagggtgagactctctcccaattaaaaaaaaaaattatctgaggtcgggcatggtggcttacacctgtaatcccagcactttgggaagttgatgtgggaggactgcttgagcccaggagtttcagacttgcttgggcaacatagcggaaccccgtctcctaaaatatctatatattttagtgtttacaatgtgctaggttctatggataaagtagtgaaaaaggcagacaaggttcctgttctgaaagtccattctgaaattttaatccaacttgtgtgcaggttgactaaaccaccattgtattttatctgactcagcacgctttttttttttcgagacggagactcactttattgcacaggctggagtgcagtggcatgatctcggctcactgcaacctctgcttcccagcttcaagcgattctcatgctcagcctcctaagttacaggcatgtgccaccacgcctggctaatttttgtatttttagtagagatggggtttcaccatgttggccaggctggtctcaaactcgtgacctcaagtgatccgcccgccttggcttcccaaagtgctgggattacaggcatgagccaccacgcctggcctcagcactcttttttattaactccccacagaaaagaacaatctaagagcagaaaacttgaatggcatctgattttaattgattaaacggattagtactcctttcttttttggaaaagcaatcattctcctttctcttgcctggaaagaataaatgccaagtgctgaaggtaaaagctatacacaggcaacattaaccatttagtctctgtgcttttccatttccaggatgtgtacttaactgcattttggaaatataagttctttcaactgttatttctgccttttatacatcagtgtagtatttataatattgagatggaaatattagagaggaggtcccattatgttgcctaggcttgcctcgaactccagagctcaagctatcctcccacctcggcctcccaaagtgttgggattataggcgtgagccactgagccgagccttgagctgggaattggctttttctgtaaagggctagacagcaaatgtatcaggtcttgcaggctatagggtctttgtcacaactactgaactctgctgttacagtacaagagcaaccatagatcttgcctaaatagataagtggggctgtgttccaatatatatttgcatttcatgtacttttcatgtgtcacaaaatattattcttcttttgattttttctaaccatctaaaaaatataacatccattcttacaaacaggttggatttggcctgtgaaccatagtttgacagtccctgctacaaaggactggttagttcagttaatcaggatctggtgatgaggccaaggctgtggatttaatcctcatgtgaatgatcaaattacctttgcactggtgaacatgttgcaatctcaaattccgccctcatttcttgccggtaacttgaagatgtgggccattattgtcaccagaagaagccaataaaagatgccatttcctcatgcttccatttctaatatagcttactgatgattatccacattcagtcactggaaagtttttttgtttgttatgtttttgtttttgtttttttttagacagccttgctctgttgctcgggctggagtgcagtggtgcaatcttggctcactgcaacctccacctctggagttcaagcgatttctggataatttttttggcatttttggtagagacggggtttcaccatgttggccaggctggtttcgaactcctgacctcaagtgattcgctcgcctcagcctcccaaagtgctaggattacaggcgtgagccaccacaccccgccactggaaagtttttgaattctactttttcagagtagagtaacacaaattgtaacatgctcctcatccccataattagagcagctataggaaaactgactcataagcctttcagataattatccaagaaagtaaaacagtaaatttgttgtgcaaatttaatattcatcttgaacgttttattgaccaagatcatatcattctgtgaatgccctaagcaattccggtagccttgctctgggagcaagaggagtacttttgtttcctgtctggattatttctgagcgcttttgaaagacccggagctctatttaccttaactaagaattgcaagatagctttgtgctgttttcatgtgagaaggttttagcttttctgccctagattctcttgcttctttcacacctcttaattacctgcttttgaaatggctttgtttttgaggtaagtaactggccataggagatttgtgaaatgtgtagagcccttgggggagatttgtaaacacagccactctttgtcacttatcattgtaaactggcattcctccagtagaaatgactttttggttacaggtagaagtaggttaaaggttggcaaagccttgtcacatggaatagttgctaaactggatgttacagaattgaggtttggaggagtgattcctgcttgtttctctgtgttatcaatagtaacaaaaagtttgtacggaagacctgggttcaaaaaaagaaataaaaatttaaaaaggccaagcatgttggctcacatctgtaatcccagcactttgggaggccaaggcaggagaattgcttgaggccaggagttcaaggccaccctgaccgatatagtgagaccccatctctaaaaataaataagtaaataaataaataaaatatcaaaataaggccaggcactgtcgctcacgcctgtaatcccagcactttaggaagctgagtggggtgtggggggcggggggtggatcatttgaggtcaggagttcgagaccagcctggtcaacatggtgaaaccctgtctctacaaaaaaaaatacaaaaattagccaggcatggtggtgggtgcctgtaatcccagctagtcaggaggctgaggcatgagaatcgcttgaacctgggaggtggaggttgcagtgaactgagatcgtgccactgcacttccagcctgggtgacagggtgagagtctgtctcaaataaataataaaataaaataacaaaataaaacaagagaattcctgggttcaatcacattctgctgaagtctgaaaacttagaatcatacttgatactccctccaacccccgacctttttttttttgagatggaatctcgctctgtcacccaggctgaagtgcagtggcaagatctcggctcactgcaacctccgcctccagggttcaaacgattctcatgcctcagcctcctgagtagctgggattacaggcacatgccaccacaccaggctaatttttgtacttttaatagagacggggtttcaccatgttggccaggctggtctcgaactcctgacctcgtgatccgcccaccttggcctcccagagtgctgggattacaggcgtgagccaccgcgcccggccgatactccctttttcttatacctcaatcccatcaaagaaccttgtcagctctaccttcaaaatgtatccagaatccaatcccttctgaggagagcaaagatcacctgatgatcaagcaggcactggggacaaaaattccttacctggagaatttagaagtaattaaacttcctttgtatctaaagtctgcatctggttccaggtctctttcaaaacaatttctaagtagctagaatttctatacatctcaggaatgtcatatggaaaatcattatgcaatccttgctgacattaaggcaccaaaatagctacaaacgtaatcatttatcatggcctactaatatggtccaaattaccctcaagcttctgccttaaggtccataaatatttctaaggaaaatccaagtcctttcttgctgaggcacctcgttggcttcttctgcaatgttctttgtttctaatacaactttcctttatcaaacctgtactgttgtcagtcaattcttcttaccagacagcgggttgaccacttttcgatgccggggctctaacacctcgcccagcaccttcttacttcctacaatgccac[135 bp omitted]acatggtgaaaccccgtctctactaaaaatattttaaaaattagcaggcatggtgacggattcctgtaatcccagctgctcaggaggctgaggcaggagaatcacttgaacccgggaggcggaggctgcagtgaaccaagatcgggccatcgtactatagcctgggcaacaagaacgaaactctgtctcaaaaaaaaaaaaaagaaagaaagaaaacaaaggtactcatctgaaatagccctttataccttctcattatctctcacccttatccagtttcatttttatccatagcacatatcactagctgacattttttttatatattgatatatttgctagttttttatctgtctcttcccaccaggatataagtccataaccataaggaatttgttttggctactgccttatctcagagcttagaacaatgcttggcacatagaaggtctcaataaatatttgttaaataaatgaattgttatattgcagcttcagctgtggatccacttacaaattagtttttgtctggacatgaaatactcccctttcctgataataagcactatgactaatttaaaagttgatcacagattgcaaaatgggtttggggacaatgatatcaatccatgtgttgcaggcactgagattttattggttgacttctaagcccaaagctaagaaggcagtagagtggaggaagaggaaaatgaataagccatggtcttcctaagctaaactgcttgtgctatagtcaaggactttgaccctggaatcagacagaattaggaaagcaaatcttaagaaatgtgatagtgctgggcacagtggctcatacctgtaatcccagcactttgggaggccaaggcggacaggtcacctgaggtcaggggttcgagaccagcctgaccaacatggagaaactccgtctctactaaaaatacaaaattagacaggtgtggtggtgcatgcctgtaatcccagctactcgggaggctgaggcaggaggatctcttgaacctgggaggcagaggttgtggtgagccgagattgcaccaacgcactccagcccgggtaacaagagcgagactccgtctcaaaacaaagtgaaacaaatcaaaacaaaaaaaaaatgtgatatttacagggtgacatatgcaggtagaggaaatggtccctccggatctaaaatgctctttttgatttgaaagataaaatacaaggagaggataaggaatatacaacaaaaataaatttgtcttaaggtggaatttattttatttatgtgtttaattgacaataattgtacatattcatgcagcacatagtaatgttacctttttttcctttttaaaacattgttttctatcacttgtgtttcacacaggacataatgatgtttcaatacatataatgtatagcgatcaggtgaggatattagcatatccatcatctcaaacagttatcctttctttgtgttgagaatgctcaatatccttttttgtgagacatggtcttgctttgtcacccaggctgcagtgcagtagcataattatagctaactgcagtcttgacctcccaggctcaagcgatcctcccgcctcagcctctcggaccacaggtgtgtgccaccgtgcctggctaatttttttttatctttttctttttcttttcttccctcccctaccttcctctcccttccccctccctgtctccctccctccctccttcgtttccttctcttctcttcccttctcttctcttctattcttctctttacttttcttctcactatgttgcccaggccggtcaatatccttctcctaactacttgaaactacatgttactgttaactatagtcatcctatagtggtacactagaagttgttcctcctatctagctttctatcgcttccttcctcctacctttcctggcctatagcatcctctgttctactttttacgtctatgagatcaccttttttttttttttagcttccacatatgagtgagatcacgcgttgtttaactttctgttcctgtttattccttaacataatgtttgagggggaatttaaatgcaagaatgtagatgtgaaaaatgaaatgggtaggtacagccaacagtacagaaaatagtatggaggttcctaaaaaaattaaaaatagaataccttatgatccagcaatcccacttctgggtatatatatccaaaggacatgaaatcagcatgtcaaagagatagctacactcccatgttcattgcagcactatcacaatagccaagatatggaaacaacctagatgtccatcaacagacaaattgataaagaaaatgtggtatacat[142 bp omitted]gaaaccccgtctccactaaaactacaaaaagaaattagccaggtgtggtggcaggcgcctgtagttccagctactcgggaggctgaggcaaaagaatggcgtgaacccaggaggcggagcttgcagtgagtgagccgagatcgcgccactgcaccccagcctgggcaacagagcaagtctccgtctcaaaaaaaaaaaaaaaaaaaaaaaaaaaagaaggaaaccctgccatttgtgacaacatggttgaatctggagaacatcatactaagtgaaataagccagacatagaaggacaaatactgtatgatcttacttatatgtggatctaaagcagtctaaatcacctaagacaaactaacttgcctctgtaaccctttgaaagcagggtatcgcacatgaatacttccaaacgcaaaatcaattctgtgagtttccgtagttcaccattcatcaggtactgctttttgcgagtacaaacatatttttctgccgggcacagtggctcatgcctgtaatcccagcactttgggagctgaggcgggtggatcatgaggtcaggagatcgagaccatcctgcctaacacggtgaaacccgtctctattaaaaatacaaaaaattagccggacgtggtggcgcgggtctgtagtcccagctactctggaggctgaggcaagagaataacttgaacccaggaggttgcagtgagccgagataggtccactgcactccagcctgggcgacagaacgagactgtctcaaaaaaaattttttttacctactataaaataaaataaaataaaatagccaggtgtggtgggatgcacctatagtcccagctactccagtggctgaggcaagagaatcccttgtttccaagagtacgagtccaacctgggcaacatagtgagactttgtgtctaaaacaattaaaaataaaattaaatagtcaaaataatagtagaagagagtggaatggtggttgccaggggctgcaaggaggggaaattgaggagacgttggtcaaaggatacaaaatttcagttatgcaagatgaataagttctggaagtctaatatatagccacatgactctagttaacaatactgcactgtatacttgcaatttgctaaaaggatagatcttaagtattctcaccacaaaagaaaaaagaaatggtaactatgagaggtgatagatccattaattagcttaattatggtgattatttggatatccatatatcaaaacatcaagttgtacaccttaaacatatgtaatttttgtcagttatgcctcagtaaagatggggaaagtgaaatgggtggaggattttgagaagtacaggagcatgaaacagtgataaataaaaatgcaaacttctccactataaacctaatcaggataggagtttggtgtggttgaaaacaatgtttatgcaaatttacaagaaaaaaacaactccattaaaaagtgggcaaaggtcatgaacactttttgaaagaagacatacatgtggccaataatcgtgtgaaaaaaagcttaacatcactgatcattagagaaatgcaaatcaaaaccacaatgagataccatcttacaccactcagaacagttattattaaaaagtcaaaaaataacagatgctggtgaggttgcaaagaaaaaggaatgcttatacactgttggtgggagtgtaaattacctcaactattgtggaagacagtgtggtgattcctcaaagaactaaaaacagaaataccatttgacccagcaatcccaatactgggtatatacccagaggaatataaattattctattacaaagatacatgcatgtgtatgttctgctttattttattttattttatttgttttgttttgttttgagatggagttttgcctcttgttgccaaggctggagtgcaatggcacaatcttggctcactgcagcctccacctcccaggttcaagcagttctcctgccacagcctcctaagtagctgggattactggcacctgccaccatgcccagaaaatttttatatttttagtacagacgaggtttc[142 bp omitted]aagacatggaatcaacctaaatgcccatcagtgatagactggataaagaaaatgtggctccagtggctgaggcgggaggatcccttgagccacatatacacaatggaatactatgcagccataaaaaagaatgagatcttgtcttttacaggaacatggatggagtgggaggccattatccttagcaaactaacgcagaaacaaaaaaccgaataccacatgttctcacttataagtgggagctaaatgatgataacacatggacacatagaggagaacaacaaacactggagcctttcagagggtgggggggtgggaggagggagatgatcaggaaaaataactaatgggtactgggcttaatacctgggtgacaaaataatctatacaacaaactcccatgacacaagtttacctatataacaaacctgcacatgtacccctgaacttaaaataaaacttaaatagaaaaagaaataatgtctattgaatacctactatgtatttggcatttaacaggtttttcttatttaatcctcataacaggtagttagataggtattattggcctcattattttattataggtcaataaagtgaggctcaaagggctataaaatgtattcacagatgacagatgagtggaagacctggaattcctacccagatctgacttcaaggacaagattatcttcctgtgataataattgcctcctctgaacatttgcagttattactgtctgtgctgttcatcattgcgatgtggggttttgtttttgttttcgagacggagtcttgctctgtcacccaggctggagtgcagtggcacaatctcagctcattgcaacctctactccctgggttcaagcgattctcctgcctcagcctcccaagtagctgggattacaggcacctgccacaacacctggctaattttgtatttttagtagagttggggtttcactctgttggccaggctggtctcaaactcctgacatcaagtgatccacctgcctcaacctcccaaattctgggattacaggtgtgaaccatcgtgcctggcccatcccaatgtattttattactttatgacttatttgaaccttccttcaggctaaggttcaaatggcagattaagctctcaggcatgcagtgcctttcacaatctgactcccatcacctttccagcctcttctcttcccactccaagccatccttggtgtcacagcaatgaaacaaattccgattagaactcctgcttcaaaacctttgctcattctgttatttttgtgataaagttcaaactccttaacatgttacctacctttcctaacgacctacctttccagaatccacccccattccaaataccctgaacttcagctgcatcaaacaaacgcaccattctctgtgctattcaacacctcccaatcaatccccatgtgttctacctcagccctcagaaagaaatgtcccaacttcccctatctctacacaagttctttctgctccatagaatgcactttcccctttgcttggtgaaaatttttttttaaactttgtattgtgtaccaaatatcacattattggtggagccttaccaaccttccttatggcattttattgtcctgatttgtaacttttttgtttgtttgtttgagacacagtctggctctgtcacccaggctggagtgcagtggtgctatcttggctcactgcaacctccacccgctgggttcaagggattctcctgccttagcctccctagtagctgggattacaggcatgcgccaccacgcccagctaatttttgtatttttaggagagacaaggtttcaccatgttggccaggctggtcttgaattcccgatctcaagtgatccgccctcctcgacctcccaaagtgctgagattacaggtgtgagaaaccgcacctggccagatttgtaatatttttgaccatctactttttccttttttttttttttttgagatggagtttcactcttgttgcccaggctggagtgcaatggcgcactctcggctcaccacaacctccgcttcccgggttcaagcaattctcctgcctaagcctcccgagtagctgggattacaggcatgcaccactacgcccggctaatttattgtatttttagtagagacagggtttctccatgttggttgggctggtctcgaacttccgacctcaggtgatctgcccgccttggcctcccaaagtgctgggattataagcgtgagccactgcgcccagccttatttttccaagagtccatcagctccccaaggataaagaaatggacacattcattcaggtgtcattagaacctggcatacaacatatgcgcaatagatgtcatgatgagtgaattaattaacaattcttctttgagtctagtatacccctcatttttaacattaatttgtaacccaaaggcctcataataaccagtgaaaatttcataagaaaacttttctctgcactctttctaccaaggcaacaaaaagaaaaatatcacacacaaagaaatacttgaggctgggcaccatggcttatgtctgtaatcatagcactttgagaggccaaggcaggaggattgcaagagcctggcagttgcagaccagcctgatcaacgtagggaaactttgtctctacaaataattaaaaaattagccgggagtggtggtgtgcccctgtagtcccagatacttaggaggcagagacaggagggttgcctgagcacgggaggctgccatgagacatcatcatgccattatattccagccccagcaacagagcaagatcccgtctcaaataaagaaagaaagaaaaatacttgagtaagtggaaaaataaaccatatttttgaaggagaatctggttagaataaagatattatcaaagtaattgctcatgtagattccatcaaattctcaaagagaatttttttaggggttcatttttgttttcatttgggccttgcaagatgattttaaagtttatctgggtgttcattgtacaattctttcaacttttctatatttgactttgtttttttttggaggtggagtcttgctctgtcacccaggctggagtgcagcagctcgatctcgggtcactgcaacctccacctcctgggttcaagcgattctcctgcctcagcctcccaagcagctgggattataggcgcttgccaccactcccagctaatttttgtattttttgtttgtttgtttgtttttttgagatggagtctcgctctgtcacccaggctagagtgcagtagcatgatctcggctgactgcaacctccacctcccaggttcaagcgattctcctgcctcagcctcctgagtagctgggactaacaggcgcctaccaccgcgcccggctaatttttgtatttttttttttagtagagatggggtttcactatcttggccaggctggtctcgaactcctgaccttgtgatccatgtgcctcagcctcccaaagtgctgggattacaggcttgagccactgcacccggccaatttttgtatttttgatagagatggggtttcaccatgttggtcaggctggtcttgaactcctgacttcaggtgatccgcccacctcggcctcccaaaatgctgggattacaggcgtgagccactacgtcccacccaaattccagattttaaataattatatgtaaaaaatgaaattaaaaaaaattagaaggaaacgtgtaggtatttaattctaaaaagggataactttctaagtacaaatggaaaaagaaataataaatttcaggatttttgcaaaaaaaatttaacttcaatttatcagtaagaattgaaagttaaggctgggagcggtggctcacgcctgttatcccagcactttgggaggc[134 bp omitted]gaggcaggagaatcgcttgtacccgggaggcggaggttgcagtgagcaaagatggcgccactgtactccagcctgggcgacagagcaagactcttgtctcaaaaaaaaaaaaaagaaaaaaagaaaaaacaaagttaaaaagaaaaagaaaaaaaacttggaaataggacacatgacacatgaatatactattcctttatatcaacctttacaaatcagaataacaccgtaggcaggccacggtggctcacacttgtatgccagcactttgggaggccgagtgggtggatcacttgacgtcaggaattcgagaccagccgggccaacatggcaaaaccccatctctactaaaaatacaaaaattagccaggcatggtggcgggcacctgtaatcccagctactttgggaggctgaggcaggagaatcgctggaacctgggaggcagatgttgcagtgagccaagatcacaccactgcactcaaacctgggcaacgtaagcaaaacctcgtcaaaaaaaaaaaaaaaaaaagagagaagaaatacatatatacatatatatatgtatatatatatgtatatatatggagacactaggaacacgaaaaatatttcaaatattcaattcagtgaaaaaaagcagaatataagtggttatatttattaattgcaacaacatagaaatatgcgtatataggaagtcaggtgcaactgaaaatagttgtggattgtagttgtaataggactggaggtggtttttttctccctctcaaaattgtttgtagtttttaaaaattatcattaagaaaattatgggctaaaaaaatgggctgagtggggtggctcactactgtaattccagcattttgggaggctgggtaggaggatcacttgaggctaagagtttgaaaccagccttggcaacatagagagatccccatctctacagaaaaaccaacttttaaaaattagcatggcctggccgggcgcggtggcttacgcctgtaatcccagca[133 bp omitted]tgagggaggagaatggc[146 bp omitted]cccagcactttgggagtctgaagcgggcggatcacaaggtcaggagatcgagaccatcctggctaacacggtgaaaccctgtctctaataaaaatacaaaaaaattaggggggcgtggtggcgggcacgtgtagtcccagctacttgggaggctgaggcaggagaatggcgtgaaaccgggaggaggagactgcagtgagcccagatcacgccactgtactccagcctgggcgacagagtgagaccctgtctcaaaaaaaaataaaaataaaaataaattagcagccggtgcagtgcctcacacttgtaatcccagcactttgggaggctgaggtgggcggatcgtttgaggccaggagttcaagactagcctagccaacatggtagagccccgtctctactcaaaatacgaaaaaattagctgggtgtggtggcaggcgcctgtaatcctagttactcaggaggctgaggcaggagaattgcttgaacctgggaggcggaggttgcagtgagcagacattgcac[140 bp omitted]agaaatcccgtctctactagaagtacaaaattagccgggtgtggtggcgcatgcctgtaatcccagctactcgggaagctgaggcaggagaatcgcttgaacccggaaagtggaggttgcagtgagccgagattgcgccattgcactccagtctgagcaacgagagcgaaactccgtctcaaacaaaaaaacaaacaaacaaacaaaaacagccaaactctacctcaaaaataaaataaaattaaaaaaaaaattagccatgtgtgatggcaagtgcccgtagcccctagcaacttggtaggctgaggagagaggattccttgagcctggaagttcaaggctgctatgaactatgatcatactactgcactccagccctgtcgacaaagtgaggccctgactcaaaaataaattggccagcagttgctcatgcctgtaatcacagcactttgggaggccgaggcaggcagatcacttgggtccaggagttcaagaccagcctgggcaacataaggagacccagtctctacaagaaatagaaaaattagcccagcttggtggtgcacacctgtaggcccagttactcaggaggctgaggtgggaggatcgcttgagcctgggagatgaaggctgcagtgagctatgatggtgccactgcgctccagcctgggcaacagaggaagactctgtctcaggagaggcgccacctttacaaatttatgacctgcttttagacaaatacggggatggcagagagttttccttgtatttgcttcttctcaattgtcttcagctcaacatagttaatatgctgaaatggcatattttggtgtgacatattctgctacccttccagctgtatttttttttttaagaattcatccttcacaaaataaggtcttttcctccttcacattataatgtatccctttgaacattatctgtaacttttataaagctgttaatcacagagtttctaaacctcagcactattgacattttggctcagataattttttgttgtttgtgtcttaatcactgtatgtttagcaggatctccgtctccacttgctaggtgccaataacatcgctttccaaaagttgtggcaaccaaaaatttctccccatattgtcaaatgctccctggggctggcgggcaaaattgcccttgattgagaaccactgcgttaaaggaaagtcaatggcataaaatgagagcgtgtagctggctagttatgcccttattttaccacgagaggtctccctagaccccattatagttctaatctggacaatacagggctaagggcgccaccaaatagattgttatgacttggtggatggtgacagtaggtttacacactaaagcagttgatcaatctcccatgcagaagaattccaaataaattatgtaactactctactgcaaaggaggggactataactcctcactccttaagtgtaagctctgcatggtgacttctgtccaaagagtatgacaaggactgggaggagtcactacagtgggggaacctgacaatcagccaggtgatccaggagaacatcaacactgataaatcatattgatagtatgtacccttgatatgatgtcatgaaaatggcactttacctctgtgtcatccccccaaaacacacatgaccccagtctagtcatgagaaaagcatcagacaaatcttaatagaggggtggcctgcaatatacctgatgagaacttctcaacactgtcaagaccatcaaaactggctgggcgcagtggctcacgcctgtaatcccagcactgtgggaggccgaggcagatggatcacctgaggtcaggcattcaagaccagcctggccaacacagtgaaacccaatctttactaaaaatacaaaaattagctgggtgtggcagcgagtgcctgtggtcccagctactcaagaggttgaggcaggagaatcgcttgaacccaggaagcggaggttgccttgagctgagatcatgcgactgcactccagcctgggcgacagagcgagcctctgtctcggaaaaaaaaaaaaaaaagaaaaaagaaaacagcatcaaaaccaaggaatgtctgagaaactatgacaaccaagagaagcccaaggagacatggcaactaaatgtaaagtcgtctcctggctgggatactggagcagaaaaaaggacatcaggtaaaaactaaagaaatctgcataattatagcaaatgtgctacactaatatgcaatattaataatacaggaaactatgtcaagggcagggttatatgaggactctatatgctgttcagcttttcagtaaatctaaaaccactctaaaatttgtctattaattttaatttaattttattttattttgagacagattctcactctgtcacccaggctggcatgatctcggctcactgcaacctctgcctcctgggttcaagcaattctcctgcctcggcctcctgagcagctaggattacaagtgcccgccaccacgcccggctaatttttgtatttttagtagagatggggtttcaccatgttggccaggctggttttgaactcatgacctcaggtgatctgcccgcctcggcctcccaaattgctgggattacatgcatgagccactgcgcctggcctaaaatggtctattaattttaaaaagcatctgatcaagtactgccttggcaaaataagcaaagaagcctttaaaatgatgaatttcctagaattctgtttttttttttttttgacttagttctcattacatcacccaggctcgagtgcagtggcatgatcatagctcactgtagccttgcattcctgggctcaagtgattctcccacctcagcctcccaaatagctgggactatagatgtgtgccaccacgcttagctaattttcttatttttattttttgtagagataggatcttgctgttgcccagtctggcttcaagggatcctcccatcttggcggcccaaagtgttgggattacaagtgtgaaccaccacgcccggccttagaatcttattgctgatctcaagggaataatttggtgactgtcatgtgaaatgccaccttcacaaacaaatccatcttctcactttatgcagcagtatcagttaagaaaaacgaagattgacaccaaagaaaaaaaactttgaatagaataaagaagtccaactatttttttttttttttgagatggaatttcactcttcttgcccaggctggagtgcaatggtgcgatctcagctcactgaaacctctgcctccaggttcaagcaattctcctgcctcagcctcctgagtagctgggattacaggcatgtgccaccatgcctggctaattttgtatttttagtagagatggggtttctccatg[137 bp omitted]aggctggcgtgcaatggctccatcttggctcactgcaacctccacctcctgtgttcaagcgattcttctgcctcagcctcccgagtaactgggattacagacacacaccaccacacctagctaagttttgtatttttagtagggatggggtttca[142 bp omitted]aaaagtggcatgatcatgtgaggtgaataagaactattgtatctcattgctatcccttcgaagttgatactatatcccagtaccatattcagatgaggaaaattgagtcttgaagagattatgaatctgcccaagatcacagagctagcaagtgacgaaactaaaattcaaacccaggttttttttgttttttttttttttttgagacagagtcttgctctgttgctcaggctagagtgcagtggtgcgatcttgactgaaacctctgcctcctgggttcgagcgattctcctgtctcagcctcttgagcagctgggattacaggcgccggccaccacacccacctaatttttgtattttcagtagagacagggtttcaccatgttggccaggctggtctcaaactcctggcctcaggtgatctgcctgcctcagcctcctaaagtgctgggattacaggcatgagccactgcacctggcaagagtaaatatttttaaatgagacattaagacctgggttttggctgcgtacagtggctcacgcctgtcatctcagctctttgggaagtcaagtcaggaggatcatcagcagtcaggtgtttgagaccagcctggccaacatggcaaaaccctgtctctactaaaaatacaaaaattagccaagcatattggtgggtacctgtaatcccagctactcgggagggtgaggcaggagaattgcttgaacctgggaggcagagtttgcagtgagctgagaccatgccgttacactcccgcctgggcaacaagagcgaaattctgtcttaaaataaaataaaataaaaatattcactcttaactctttggcaatatttcctcccaccgtgtgacagtcgaggttattcactgcactgtagagtaggtatgatataattaaatggcactgaacaaaaaccagaagtctggatcctcctttggctcaggataccaatttccttaccagaaaattgtggataataataccttgccctgttgacctcactgagttattttaagggttaaatgagagaatctatgagaaaatgtcttgcaccccgtgaagcagggcattgtatcacgaacacatttttactttccagctttctgcaaatatgtgtgtgagttaattgtaaaatggaatgtgtgcagatgattgaagcgcacttccgaccagaaggcttagaagaaaattttgtcagctttaaatttgccctttgaatagaagatcccaagcccatggtcctcatcactgattacttgtggagttttgttttttttgtttttttgttttttttttgagacagagtctggctcagtcacccaggctggagtgcaatgacacaatcttggctcactgcaatctttgcctcacaggttcaaatgattctcctgcctcagcctcctgagcagctggggttacaagcatgcatcatcacacccagctaatttttttttttttttgtattttgggtagagatggggttttaccatgttggccaggctagtatcaaactcctgacctcaagtgatcctcctgcctcagcctcccaaagtgctgggattacaggcatgagccaccatgcctggccacttgtggagtttttaaagggatccatggccgggcgtggtggctcacgtaatcccagcactttgggaggctaaagccgggagataacaagatcaggagtttgagaccagcctggccaatatggtaaaaccccatctctactaaaaatacaaaaattagccaggcgtggtggtgggtgcccgtaatcccagctactcaggaggctgaggcaggagaatcccttgaacccgggaggcagaggttgcagtgagacgagatcacaccactgcactccagcctgggtgacagagcaagactctgtctcaaaaaataaaacaaaataataataaaggcatccatgaccaggatctatcctggaccaattaaggcaattagaattgcctaggagtagggcatgcgtggcactggtatttttcaaaagctttccaggtgattcgcatatacaaccaaagctgagaactgctgtcctaattgatctaaagtctgcccaattccatgggggcccaatgttaccctgtctgcacagactgctcatcaccctgcaaaactgatggagttggaatattcccaacaggaagtgaaggtaaaataaaagtctggtcagtcaagctgctaggacagcagatgatattgtcatttgactaaatgaaatggacctatttgtttcactcaaagaaggaagagcccagtcaagggaaggagaatgcagcagaaaggagaagtagctggccatgcaatgagttcgtactctgccatggtagaacgctggtctgagctgctgtttaaactctcgcctctgcatctcagttgatcttgtgtatcatgttgtctgatgaacctctgttgggagcctgggcctccgtgctgggcagatcaaagcaacaattaagcttacaaattagtaaattaaccctgttcaaaaacaggccacagaggccgggcatggtggctcatggctgtaaccccagcactttgggaggctgaggcagtcggatcatctgaggttaggagttcaagaacagcctggccaacatgatgaaaccccatctctactaaaaatacaaaaattagctaggcgtggtggcacatgtctgtaatcccagctacttgggaggctgaggcacaagaattgctggaacctgggaggcggaggttgcagtgaactgggatggtgccactacactctagcctgggcaacagagcgaggttccgtctcaaaaaaaaaaaaaaaaaaaaaaaaaacaggccacagaagaaagagctgttaagcaaggataacattaggtggccaggctcatgcctgtaatcccaacgctttgggaggccaaggcaggcggatcacttgagcccaggagttccagaccagcctcagcaacatggcgaaactttgtctctacaaaaaatacaaatactagctgggagtgttggcttgcgcctgtaatcccagttactcaggaggctgaagtgggaggatcgcttgagcccaggaggcagagattgcagtgaactgagatcccaccactgtgctccagcctaggagacagagcaataccctggctcaaaacaaaaatgaaaaaaagttaggtgtcctacagaattaatataattcagagctagaaacttccttcttttggaaacaaagcctaggttaccttaacaaatctaggacctcgttattgagaggtgagcagtgtcttggagatgaatccacgttaaccaagttcacaagagaccactgctgcattatgcaatgactagacgttaccactggatggtgcattctttacctgtaagaaatacacattggggccagcacggtggctcacgcctgtcatcccagcactttgggaggccaaggtgggcagaccagctgaggtcaggagtttgagaccaccctgaccaacatggtgaaattctgtctctactaaaaatacaaaaattagctggccatggtggcgggcatctgaaatcccagctactcaggaggctgaggcaggagaatcgcttgaacccgggaggcggaggttgcagtgagcccagattgcaccactgcactccagcctcggtgaacgagagagactctgtctcaaaaaaataaaaaagaaatatatgttggtgagcccagttagaaccttaagttacacttgaaaatcaagggtataataaagaaatgagttggatgaccttaaaagatagtacctagctggatttgttcaattcctctgtaggggtaaccagttaagctgaatgaaatacctgagactgtggcaggatattttctgccatgttggagaaattattgctctgtttttttgtttgtttgtttgtttttcagacggggtctcactctgtcagcccaggctggtgggagtgtagtggcacaatcttggctcgctgcaacttctgcctcccaggctcaagtgatagatctcccacttcagcctccggagtagctgggaccacaggctcatgctaccatgcccagctaatttctttctttttttttttttgagatgaagtcttgctctgtcgcccaggctggagtgcagtggcacaatctcggctcactacaacctctgcctcctggtttcaagcaattctcctgcctcagcccccaagtagctgggactacaggcgcaagccaccacacccagataatttttgtattttttagtagagatggggttttgccattttggccaggctggttttgaactcctgacctcaggtgattcacccgccttgacctcccaaagtgctgggattagaggtgtgagccaccgcacctggccgaaattcttgctctgcagaaatcacttttttcagctcggtgtggcggctcacgcttgtaatcccagcactttgggaggccgaggtgggtggatcacttgaggtcaggagttcgagaccagcctggccaatatagtgaaactctgtctctactaaaaatacaaaaattagcgggggcttgctgatgcgcgcctgtaatcccagctagttggaggctgaggcaggagaatctttgaacctgggaggcagaggtcgcagtgagctgagattgcgctactgcattccagcctgggtaacagagtgagaccatgtctgaaaacaaaaacaaaacaagccatcacttttttcagaccaagggtctccaaatttttttgattgtgtgttcctaatggtaaaaaattataaatctacctttcaaattatgatggttaatagtgagtgccaacttgattggactgaaggatgcaaagtattgttcctgggtgtgtctgtgagggtgttgccaaaagaaattaacatctgagtcagtggactgggaaaggcagacccaccctcagtctgggtgggtaccatctaatcacctgccagtgtggccagaataaaagcaggcagaagaatgcgaaaaggctagactggcttagcctcccagcctccatctttctcccgtgctggatgcttcctgcccttgaaatcagactccaagttcttcagctttgggactcttggaccttcaaccacagactgaaggctgcactgttggctttctgcttttgaggttttgggactcggactggcttccttgctcctcagcttgcagacagcctattgtggaacgtcatcttgtgatcgtgtgagtgaatactccttaataaattccccttcatatatacatctatcctattcgttctgtccctttagagaaccctaacacattagtcatctgtggataatttagcgctctctctcttttttttttttttggtattatcatcttgtcgaatctgaattgcttttataatgtaatgtgtctgacagacaggctgacagatgtattaagggtaagtaaagtgtcaacctagctgagtgtggtggctcaagcctttaatccagactttgggaggccaagggcagaggatcgttcgaggccaggagttggagaccagcctgggaaacaaagcaagacccaacttgtaaaaaaaaaaaaacttgaaaattagctgggtgtggtggtgtgcacctgtagtcccagctacttgggaggctgaagtgggaaaattgcttagagccaggagttcaaggctgtacccttgcattccagcccgggtgacagagcaagaccctgtgtttgga[131 bp omitted]taagattaacacttttctttttctttctttctttctttttttttttttttttgagacggagtctcactctgttgcacaggctggagtgcagtggcgcggtcttggctcactgcaagctccgcctcccgggttcaagtggttctccagcctcagcctcctgagtagctgggactacaggcgcctgctaccacgcctggctaattttttgttttttagtagagatggggtttcaccgtgttagccaggatggtcccaatctcctgaccttgtaatctgcctgcctccgcctcccaaaatgctgggattacaggcttgagccatcgtgctcggccttctttttctttttttgagacacggtctagctctgtctcctaggctggagtgcagtggtgctcggctcactgcaacccccgccacccgggttcaagcgattctcctgcctcagcctcctgagtagctgggattacaggaatgcatcaccacgcctggctcatttttgtatttttggtagagacagggtttcaccatattggccaggctggtgttgaactcctgacctcaggtgatccacccgccttggcctcccacagtgctgggattacaggcgtgagccacagtaccctgcctgcttatgctttaattattattatcttcaatttgtggtttctttgcaagaatcttgttaaaccgttatccattttgtgatggttagcttagtggaagaggaatgatgtaatacaatctgtaaatccattaaacaggatacagtaactgcagggtcccacatggtatgctgaggtaagactagtaactgaggtgtcactgtcaactccttcagctgtgattttatttattttttattttttttagacggagtcttgctctgtcacccaggctggagttgcagtggcgctatctcggctcactgcaagctccacctcctgggttcacgcctttctcctgcctcagcctcccaagtagctgggactacaggcgcccgccaccacgcccggctaattttt[136 bp omitted]tgtttttattcttccctgggatacctcagtaattcatcaggctattcttcagacaacatacaatacaatggattcactcagagactagaatattttacagctttggatacaatagcaatatacaattgttcttaaattagggcctaaaaattatgccctaatccctgtgattggatatggatggccccaaatctctagccacctacttgctgacaaggtgtcttttgtgtagatgtttaatctcttccatcatattttgattttccttattgttactctctgagaggtactatatctgaagttctgggagtgcatatggactacacgtgactatacagacccacaaagtatgaggaggccacagtcatcgccatgttttactattaaaagaatggggttttgttttgttttgtttttttgtttttgagagggagtctcactctgtctcccaggctggagtgcagtagcatgatctcagctccactgcaacctctgcttcctgggttcaagcgattctcctgcctcagcctcctgaatagctgggattacaagtgtgtgccaccacgctcagctaatttttgtatttttagtagagacggggtttct[141 bp omitted]aaagagctaatttggttgaaggaatcatggtaaacaaatttactcttatttccttagcgacttcacctacgaggcttcccaggtatggggaggcttctactgagtttgaaaatactgctgtagaaggctaagcatggtggctcaagtctgtaatcccagcacttgggaggacgaggcaggtagatcgcttgagttcaggagtttgagaccaacctgggcaacatggcgaaaccctatccctattttaaaaaaaaattagcctatgtggtggcatacgcctgtaatcccagctactctggaggctaagatgggagggattgcttgaagccaggaggctgaggttgcaatgagctgagatcatgccactgcactccagtttgggtgacagagtgagactctgtatcaaaaaaaaccaaaaaccaaaaaccaaaaaactgctgtagggctgggcacagtggcttgcacacgtaatcccagcactttgggagggtttggttggatttttgttataactagttctgtgcaataagtaagtctggaggaactagagacagaagagatcctatgcccagtgtgtctgcaaagaattaataacaaaaagaagaagaaatccatacttaatcaaaacacagtgtatagaagagggttttagggtgtggaccctataagcagtctttggttgttccttctattctctccttagagaatttaattttattgtttaagagcaacgcatacacatgatactaaatggaaaggccccctttcatcctcaacctccagtgtcccagttttcttctccagcagcaaccacagttaggcatgctttgtacattcttctggtgatagtaaagtcatattcaagcatacttgtgtacatatatatatatatgtatatacacacacacatatattttttgagacggagtctcgctctgttgcctaggctggagtgcaatggcaccatctaggctcactgcaacctctgcctcccgcgttcaagtgattcttctacctcagcttcgcgagtagctgggattacaggtgcccaccaccacgcctggctaatttttgtatttttagtggagacggggttttaccctgctggccaggctagtctcaaactcctgacctcaggcgatccgcctgcctcagcctcccaaaatgctgggattacaggtgtgagccacaccgcgcctggccataagtatatattttaaaacaaatgatggcatactttgtacaattgttgtgtagcatgcttttctttcatgtaaatcctggagtttgtttactcttcattcattcattcaacacatatttaccaagcactataacagactggattgttgtttgctactctttacagtaggttatatatcatgctctctactctgtaactttggatactctatcagtaaagaagatagagtatgacttcctttcactcttgactttgtggttggccatatgatttcctttgaccaatggactgtgggtagaattgacagtgggtcagttctaagtagaggcttaagaaccatcataggtatccatatatttcttgcacattaagggtttctaaatgacagtagaaaccaaccaacctaaattcagtctgtgaccctcagcctgaagcagtatgccatagcttctctacatattcatgagggaaaaataaattttgtatctgaatgtgtgtgtgcatgtgtattagccactgatatactggggttattatcatagccagaaataaactaagacctactatgtgcccagaaacaactgtaggcacttaggttcattagggaaccaaagatctttgctcttaaggagcatctatgcgtagagttgcctctttttaatggctgcatagtattgctttgtatagaagcattgtaatttcttcaaccagtcctttatagacagatttgggttatttcaaagcatcagtctcaaaagatgaaaagcatatttctaataaaaatgcatagaaagcattattagagttttatttaactcattaatgaagaaaccagcagaacgacaaagtctgttcaaaagagaatacgacaattgagatgaggctgggcgaagtggctcatgcctgtaatcccagcactttgggaggccaaggcgggcagatcacttaagaccaggagttcaagaccagcgtggccaacatggtaaaaccccgtttctactaaaagacaaaaaacaaaacaaaaaaaccacacacacacacacacacacacacacacaagaattagccgggcgtggtggcgcacgtctgtagtcccagctactcgggaggctgaggcaagagaattgttgaacctgggaggtgaaggttgcagtgagccaagatcacaccatggcactccagcctgggtgacagagcaagactgtctcaaaaaaaaaaaaaaaaaaaaatttgagatgagtaaagtcaatggataaaaagaaattttgttgaagcttgtaatctgatatctgattttttaacaaagaaattctgaatttctaagcttgatacaaaactagttaacgtcgtgcatggtaaaaataataacctttcaggttctcttctcctggacaaaaaaataatcatccaccattatcaatgttagagagttgtaaaatgggctttaaccaattgcaaagttacatccctagagagtcagtcatttgataatactaacaattttacaatatctatttacatacatctttgtgcacatgtgtgttatcttttcttttttttttttgagagtctccgtctgtcacccaggctagagtgcagtgacacgatctcagctcactgcagccctctgcagttcaagtgattcgagtgcctcagactccctagcagctgggattagaggtccacactaccacgcctggctaatttttgtatttttagaagaggccgggtttggccaggctggtcttgaactcctggtgtcatggaatccacccgcctcagcctcccaaagtgctgggattacaggtgtgagccaccacacccagccagaatttatttttaaaataacttgcacacagcgctgggcaatcccagcactttgggaggctgaggcaggtggaggttgcagtgagcagagatcgttccattgcactccagcctgggtgacaagagtgaaactccgtctcaaaaaataaaaataataaataaataaataaataaactcctagccaggcatggtggtgcctgcctataattccagtgactggaaagacaggtagaaggcttgcttgagtccaggagttggaggccagcctgggcaacatagcaagagcctatttccaaaaaatgctttaaaaaaattcctagccagtgtggtggctcatgcctgtattcccagaactttgggaggctgaggtgggaggattgcttgaggctaggagcttgaaaccagcctgggcaacacagagagctcccgtctctaaacaatatataaaataaaaataaattaaaataaataaatccctagaagtgaaatttctgagtatattaatcttgagatttttgagagattttaatctctaattttgagagagattaccaaattgtcctctatagaaataaattatgccaatttaccttactgctaacaatatatgagtggctgttttttcacatcttctccaaagcagtgttattgaacagtttactacttgccaatttttttgtttgtttgtttttttgagacagagtctcgctatgcaccccaggctggagtgcagtggcccgatcttgtctcactgcaacctccacctcatgggtttaagcgattctcctgcctcagcctcccaagtagctgggactacaggcgcctgccaccacgccccaccattacttgccaattttgatagataaaaatagcacctcattgtaattttaatttttcttgttataagatttaacactttttttcatatctttacaagttatttgtttttcttctaccatgaactgtcacttcatatctttgccttcagaaaaattagtccttagtctgtcatacgtgctccaaatattttttttcagtttcaaatatatttctttttttctttctttttttgagatggagttttttctcttgtcaaccagcctggagtgcaatggtgcaatctccgctcactgcaacctccacctcccaggttcaagcgattctcctgcctcagcctcccaagcagctgggattacaggcatgcaccaccatgcccatctaatttttttttttttttttttttttggatttttagtagagacagggtttcaccatgttggccagactggttttgaactcctgacctcaggtgatctgcccgcctgggcctcccaaagtggtgggattacaggcgtgagccaccgtgcccagcatcacatatatttctaattctagcaataccatttactagctgcccagcctcacatctatttctaattctagcattaccattactagctgaccttgggaaaattactgaacctctctgagcctacatttacttgccagttctcaatctcttatttgaaaccctgagatagatgtgttttagattccgacatctttcagctcatatactgcatattacagagaagccagggagtttgtacttatttatttatttatttatttagagacagagcctagctctgtcgcccaggctggagtgtagtggtgccatcttggctcactgtagcctctgcctcccaggttcatgcgattctcctgcttcagcctcccgagtagctgggattacaggcatgtgccaccatgctggctaatttttatatttttagtagtagagacagggtttcatcatgttggccaggctggtttcaaactcctggcctcaagtgatcagcctgcctccgcctccctaagtgctgggattagaggcgtgagccaccttgccaggctgagtttgtactctttcaatcattaatatttctacaagaaacatatggatattctaggtggaattaacaaagactagaaatgtcgtcacgtcagataaattttgccatcgagtgagccacatcaaactaactttggattttcagagctttttggactttggaattatgctttaaaaatgtagacctgtggttcttgtgaatattcgattaaattaaacaatgcatgtaacatgtctataccagtttctaaaacataggaagcaccaaataaatgatttttactgtagttaagagggaggtgctaagccctcaccactcttgcttccagatcttttagattggcgtagggttttgctttgtggagtagtttgatctttgggtattttcttgtaaaggcaattgggatatttcaggataacagaaggtaagcagttttagtctttgacggtgtagaagaaaaagaatgattaggttttgaagccagttggatcagggttcaaatttcatagcatcagttcctttttaaaatgagggaaatatctatcttgctggttgctttgaggattaaatataactagatagaagataaactgctctgcacacaatatgtgctcaataaatggtagcaaatgttttgttaaagcattcaggaagcccaaggtacaaccctctcttgttaacagtctgaaaggcacagaatcagccactttcatgactgaaaataagagacttggacagggttcagagaaagcatttattgtacataaagaaacaaagcactgttaccataatctgcggaaaaatggcatcaggccctcttctgtgatgtaatgttgtgggactttactggagtgaggtttggagggggtatggtgagacctgtgaggagcagctctccctcctacataggcagagctggccattttcccaggtggtatggtagcgtgagagcctgtggcctctagccttcaggaagtttccattgtattgtgatttttaaaatgtaggttgtcccttttatatagaatagcctgaagtttcaagtttaatgttatcatactacaaagtaagacttctatctgttgatcagtatactctgagaacagatcctatcaatttctgcttggattcccactggattcaactcagatataaacccttagggagggcctaccatgtgccaggtgctgaaaatacaaggacgatctgataaggttccagcccaagaaggactggcagagaggacagataactgataactcttaattgggagtgtagagtgtggggtgatgtaatggagctctgagtaaagtgctatgtagggtactaagaaaaggaaaattaatttttctggggaggctacgggaaattcctccacagaagtgatacttgatccaatctttggactgaatcatcaggcaaatggatttgagatgggatgagaggaaagggctgaggggtggggaagggggtaaaggagagaacaatattccaagtgaaagaagccgcagggacaaagatatgaggcagtaggcacattcatgcatttgttcagatagtcactcaaaaatttgttgagtgctagtcactgttcttggcactggggacacaacaggaagcaagacagacaggtccctctgatgtttacacagagtttacacttcagagctggatgggaccaaaaaaaaaaaaaaagcacaaagaaatgaaaaagattatttgagagagtgatatgtattatgaagaaaataaattggggttatgatagaaagggggcatggcatgtatgaatgggtagtcctcctctctggaggaggctttttttttttttttaaacagagtcttgctctgtctcccaggctggagtgcagtggtgtgatcttggctcactgcaacctccgcctcctgttgaaacgattctcttgcctcagcctccctagaagctgggatttcagatgcccgccaccatgcccagctaatttttgtatttttagtagagacggtgtttcaccatgttggctggtctcgaacacctgacctcaggtgatctgcctgctctggccttccaaagtgctgggattacaggcatgagccactgcacctggcatttgacctcagaaccaaatggtgaagaggcagccttctgggggcaaggtattccaggtggaggggatggcaaatacaaacaccctacaacaggacgaggaacagaaaaaaggccagcttgactgcagcagtttgagcaaaggacagatggtggaagaccagagaggttggcaggcctggttactagggcctgtgggccaccagaaggagtttgtttagaagtaccatctggctgctgcacagagaatgggctggaagcagggagatcagttgggaagctgctgcttattctaggcaagagatgttggtggctccaaccagggtgcagcagcaaaggcagatgtgttcacagcaaatacatatttgtgaagtgaaactgacaggacctgttgatgaactgggggatggcgggtgaggggaaggaagatgtaattaattatttcaaattaataatgtgaaggttgagaggttaagtaaggtgaacacataaaagtgactctgttcacagcagcagtagcaccaatatggcaacagcgggaagatgggattagtgagaggttgctggaaaataattccgtgaaggctctgggaatgaatgaatttggcttcacacagaggagacagaggtactgttccattgacaaaggcaggctgataatctgtgaggccaggaatctctcaaacttttaccagcaagggtttttgtttgtttgtttgtttaagccttggctgactctgaacagatctgtttatttctctctctctctccatctctttttgctttccaggataaacatctgtctcatttcaccaactctccattggcctcagcgtctctcctctcagtagattcttcagaatactatcatccaagtcaagcagggaattctgctcatagtaggcactgagaaaatgtattgagggacaattcaagtgccccctctgggttcagagaagttgcatctattactttgtttcacttacttcattgtttcacctctcccttctcctttaccagctcaaaatgcttggctctttttgactgggaggaggcatgatcaggcttaacactttttttgttattggccggctggctggttttattgtctcctgaccctaaggtctggggcctcttccagtcccctgcatacacacagcaggcctgaaggggtcctcagagctccctctgaaaccactgtatcaggctagtcttctttagctaacgttatcttttatttaaacagaaacagtagccaccagtcttgttacataacataccaatatcctagggtgttaaactaattcagcatctactgttaggaagtggtgatgtggcaacacaaatattcgctcacacaatattgcggaaacgttgtaacaaacatgactttctggccctacttagaatttcagagctggaagggacttgagatcatcctatttcaaccctccttgttttaaactgtggaaacctaggcctggagagacaaagaaacttgctcaagaagcagatcagggcgagacggcaagctcttactaatctaaagaatccatcacatcttagattaaggattaaatgctaaacagttcttgtttgtgattcctctcatctgaaagcattccccccccccccccgttttagactctccaaactagtcagttgtgaaccaggacatagcctttgtttacactgaaactgcaaatctgaggctgatatgtcagccccacaatactgaggtatttggggtgttttgttgtttttactaaccttggtgactggattcacatgcaatagatattaactgaatacaatttggttgaccaagcatattttaaaaacagctgggtggagatgcaggtgagccagcattctgggtgtacgtgcaaaccagtgtgtggaaggcggagagtcagctgcacctcctgcagcacctcacatcctgatggctgcacagtaaaacactagtttccttggaggaagagttcccagaggaactgcggaaccccagtgtcttgagcgaaaggcaggacctgctttgttcaccttgtccgtgccaacattctttatcaaactgtcctgttttcctgctgggaaactgccccactccacccacctggtgcctccctggtttcctgactgccacgaggttattttttaacctgctcttccttgaaaagcaccaccccggtgacccagaacgtggactcctcccctctggtcactcggaccatcccactctaattaccgtcatctgcctctgaaagtcatggaaaattagcagcaatggggcggtcttcaattccactaagcccctttcgtacttttaattcgccgaaattactagcagggcagagagaagaggggaaatgcctggcttctgagcaaggcatgggtgggctgggtgcaactagcactatcattttcttttaattttattattattatactttaagttttagggtacatgtgcacaatgtgcaggtttgttacatatgtatacatgtgccatgttggtgtgctgcacccattaactcgtcatttagcattaggtgtatctcctaatgctatccctcccccctcccccctatcattttaaattcaattacccggggcctgagggccacttctggtaacttaggctatggcttagggcgaggtttaaaacgtaagaaaggaatgactatcttgagcctccagggagatgcactgcaaatccccccgccccaaaatacaacccaggttctgggaatcccagccctgccctggggacaaaccccaaactcaaataaacggcctcctcctaggcgctgagagcccacccagctttggcactctgggtccctgccctccggcaagttgccgggacgggcgggaccctaaccagccgctctcccctagcccaggctgggccgggccgaggggtgggggagtgggcggtcggggaagcggggggcggagttccgtcctctgatgattggctctgcgcggatgggctgcggctgcgcccggccaacccgcggcgtgttgctatgtgctgagccgaggggataggtgcgggggcgcgtccatcacggggtagcccccggcccggacccggagggatgcggagtggcggccgcggcggtggcggagactgtggctttaagagcgtgccgggagcccgagccccagccgggccgcgcttcgccgctgcgcaccccagcggagccaagccccacgctggccggacagggccgcctgtcgccgggtaagtgcaccggagtgcggcgcgggccgggcgcgcgtgggcgtggggcgcgctgtcagctcgggctctgggtccccggccccggcctccggactcccccggccgggcctgcgcggggttgggggtgcggcgccctcggttccgcgtggggtccccgtgggcgccggggacggggagcggccgccgggccacgtgaccggtttgtttacaaacactgccgggcccgcggccgctcgcggagggagcccaagggcgcgggacccccggccggggcgggagacgcgcgccaggggctgggcgagtctgcggggccaggtttggggcgggggtgcggagctggaatcgccgcttcctcctccgcgtcgtccccatgggttcggactccatggggtccgggtggggctggggacgccctccgtcctctcgtgacgccgcgtttccctcggagagtcctggggacacttaggtccaggggcgccgccctgggggccttccactgtgggactgggcgccctcgaaatttctcggagcgcgtcgtctgccccgacccgggtcgaggtaaccgcagccgagttcctccctggccgcgtctcggcgcctccccggtgtccttgccaagggggtgggcgcgaggtcctgcccgacggaacgcgggagcctctgccgcgagcgcctccccggagctggcgcttaggggcggccccgacctttcgccacttccagttcaccctgcttggccgccgacctcctctggtgtctttcccggagtggtgggcttttctccggtcttgggggcgtgcgggggtgggggacacctgttcttctggacttcttgtccggaagattgctacctctgccttcagtcttagctgcgagagtttaaaaagccaggtgagcgagtgtcttgttttcctccgcttggagcggagctgcaccctcgcccgccccccagtcccgccgctgtgaaaggccccagagaactgctccgaagctttgctggggtttttgctttctggcctccttgctgatttgctgtccttgcaacttgggaggctcttgagtgagtccttgcctttggtgaatctgaaggctaacgagacagctgtcttttcctccctgcccttccttccttgttcttccttgttccaaagcattgggcaagaagggtagcggtcagcttccctgtgcctcacagagcattaaagatgcaagaagttcagtaaaccgcctcactggctctggggtgggacttgatttcacatggttattgctcccccgtgctttcctgcctctgggggccacagggcctatgaatggctgagtcttgcctccggtgaggaacattttcattcttctaaactgtgttttgagtggctgcaagttcttttccccagaaacaggcccagcctggggagagctgtgcagacttcccccttggcaccatcccctgtccccagctccatgataggatctcaggcaggagtgcagtgggagcctcatccgcttcctcagttgggctttgccgccgcaggttagcattcaatgacagcatttcttggatctgtcttgatatttctgtgcttgaaccaaaatcaagaagcttagagttaggggtggaaaatggaaaataaacaccatgcgcgagaaaactgttttccttcttccctctaggagcatggttttcagactttgagtgggacctgcactgcatacaggtctgtaactgaaataagtttcagagaacaataattacccttactccctgcagtgtgctctgttttaaaggtttttttttctacttcatttaaaaaaatcaactgctggttatgacccattaatttgatttcctgaccaagcaggtcctgacccatagtttgagaagcatcgctttaaggcagaggtcctcaaacttaaatgtgtataaagatgacctgggtagtgtttaaaaatagtttgtcaggctactccgcagatgtttattttcagtgggccacaggaatctgcatttttaccaggggacctatgagattgtgatgcaggtgcttgataagagcccctgatctagtgggaactggaggcagtgaacaatgaaaggtattaacttggctctgaagtgcagtcaggtatgtgaccccatactctgcaatcccaaaatcactcagctgccaatcacactagcttaggctttgaaaagtctaagggcacagtattgtttgttctcaactgccatgaagcagttggctttaagagactggtatccctccctctccactccagcctgtttgagggctgctgcacagtgttgtgtaccaggagatgtttctaggtgtgtgggggttggagatgtgagtagtgccgatgagttgcgtgagttgctgtgctgttcatagattatgtgaattcttcattgtcgtaatgattttcacggttttgaggcagccacacagtcattgtgcctgggagattcacaattggccagctgaagaagaggttgattttgtttagtatccgtgtattccagactgcatagcctcgggggaaggcaggcaggtgactctttttatttgggggggggtgaggagtcaggagtttgtctaccatcaggtcttaataagaggcacaagttcccatacctcctgggctaccccagtcctggttacttcccattgtgatggcccagtccctgtgtgcaggcgaatcttgttaggcatccagtttctgatgctgttatctgccttcaggcacaaacacacacacacacacacacacacacacacacacacgcctgatgcagccacaggttagatttttccctcttagttattgtgtccagacatattggtaggatacatttatttgaattaatgaaagctgcgatttagcttcaaaaaggactctatccaaattcaacttccactgtagcccttcttgctaaaggtgtgccttatgggagcatcaagcgtgggattttaaaaattaactttaataatgttcagtttggccaagcaactcacattcagaatgtttagttttgagcatatggagaaaagaaagcaacaaaaggatggcaagggataagatgtcccaggattggaaaagccagaaggaagagatgttgaagtgagattcagatggaggatgtgatcaattcccattgtaaattaccttggcatttccttagggtttgtcaggcaaaccactaggtgctctgacaactgcattcccctgagcataaaaaggtataaagttttggaaaaggaagaagcatcattttcaacttgagcctgtaatgatggaaagccagccagggcctgcaggctaaagatattttttagagttgttagttttcagtgacattgtccttaacaaaaggtgatacacttgagtctgtgaagtattgtactgcctgagtttgtttacctgggagctgtggatatagcactggagagcttaaaagtaaatcagaatttgctattctcttgtcgccaatttgccaatggcttcccattgcccttcagatataatctaattcctttccttgtaggcaccacacggcttgtcctactcccccatcttctgcctcatctcttaccaatccccaacctgtccactctgcttcttcctgcttgagaaaagctcgcctttctgaggtttctgaaacatgccatacttaggtttgtcatagggcttttctactggtagtaactctttccaggattctttctccagatttttcttttctgtttgagacagggtcttgctcttgcccaggctggagtgcagtggtgtgatctgctcactgcaacctctgcctccctgattcaagtgattctcctgcctcagcctcccaagtagctgggattacaggcgcaccccaccacgcccggctaatttttgcatttttagtggagacggggtttcaccatattgtccaggctggtcttgaactcctgacctcaggtgatctgcctgcctcagcctctgacaagtcttgggattacaggcataagccaccgtgcctggctctttctccaaatttttgcgtggctgactctcacttggttctcagagctacttcctgacggaccagttatctagaacagctcctcccttctctgcccctcagcctctcttaatccccttaactttattttcttcaaagcactttaataccgtctggaaatatattatctacctgtttgccgacacggaagcttgagagcttctctgtcttgcttgctgctgaaaatgcttggtgtggagtagacactggataagtatttgttggttgaatgcgtgaatgaccaagagaaccaaggtttagaatctctagaggaggaaatatactttaagaggaaaagataattctctttttctgggataatatagtatgctctcagaattactttcacttgcactatttctgcttttcacaatagttttcattcctttattccatttataggttggcaaagcctccaaaagctccattgttattttgttgtcattaataataaacaactcttacctaccccagtaaccttattctaggcctcgctgtttgttttcttctaacaaatgttagcatttctatcagtaatcacatttcattaataccaggaggcactatatgtggggctaagagcctggactttggaatcagaaagacctggataattagctctgtgaccttggcaatctactaaaattctctaaatctttgttccttatttttaaaatggtactaataatagtttgcatcacacgggactgatgggaggattaaatgagactgcaggggaaaccaggtacagagcctggcacctaagcactcagtgctagctattaataacagcactaacattaataggtggattcccctctctctggctcagaggaatccattctcaatccattgatttgggagtggacagtgtgtggtggggtcagaggaggacttcttaatataagtaagtaaagactgaaaatgccacttacatctatttgaactggaatggaatttagaaaccatgtattcgcaagctgactgctgcccaacacccacctggaagaagtaacagttacagaagtttttggaaggacgagttttctatctgctcctgtggcgattcttggttttagacttgattaggctgggccatctgcatgtgccattatgtcagcccctccgttgttatttttaccgagttgggcttcagtgtctgccctttgctttatggaaggacactgtcagaaatagctttatataacttgttactgtaattcttataagggtttatattgttgaagactagctacagattcaatgccccctttaagaagttcatgggagaaattctttttttttgttttttttgtttgagacggagtctcgctctgtggcccaggcgggagtgcagtggtgcaatctcggctcactgcaagctccgcctcccgggttcacgccattctcctgcctcagcctcccgagtagctgggactacaggcgcccaccatca[172 bp omitted]ctctgaaaagctttgcctctcctgaaaacctggtatgctttttcttttgtggaaattggaaatttatagcatgataaatgctataaatgctataaatgataaatgctttttgctttggctaccaggaagtacagagtgaaatttgtggcttgattttagtgactatgtagggccctgcatcctaattttttctagtgttaaccttgtaatttttgttttctattaattaggtatatactgggttgggcattaaagtctgtttaggtgttaacattttggagatatacacactgaggttcaaacagacaaaaaggacttgctttaagacatagtgctaattagggcaaagcggaagctataaaccataccttctgtttcccagacccaggcctcttcctactgctgcgcattctggaataataccagctcctcatctaaaccctaaatagcccatgtctccattctaggcagagtctaccttctctctgaaacgagacagagcagcattctgcttgcgaggtgcagcagtgccacctgcattcctgttacctggatggctcagcaatacctgggtctcctgagctacagaggagtcagccctcccctgtggtcttaaaagcagtgtgtctagactgagtggctttgattcgaaactggattgctggctccatgtgagcttaccctccagtgtctggagttcctttgtctgtttctcactgggaaaggaaggcttgacatccagttggcagatgggtgccactgaggctcaaacatgatcttctgggtgtgaatggtgaccaagttcagttgcaccagagaaagtggctttgttttacctgatacgaaatttttagttctaggaaatactgacctttctagtgattggtattttgttttctcaagacattctgttcaggagtacctgaggcaaataagtgtaggcacggaacagatcctgcccatcaggaatattttgatccctatttttgagatggattggtgaagaatgaagaggatttacacatacagaaacattccatggggaacagttgtgcagaggcactgaggtgtgaatataagagggagtgtatggggaatgttcaggaagcacgtgagatggggaaagagggcactgggatgtagttctcagctaccatggctgcagatagagcactccgtgggagtggactgtgacttccttcacagtaagggtgaagagcactgcacaatggctaattgcctcagatcataggcgtctccaggagggaggctatctctagggattctcgaagctggctgccttaagaattcatcgtcctgctaaaggcctacaaaatcagaattttcaggatggggaatttgtaacaaaaacaagaaaatagtaacaacccctgaaaaactgtttcccaggttcttctaaagcagccaaccccacacatgactgaggtctggaaaccactgaggtcgtgcttgatccctctggcaggagctaccaagcagccttggcttttggcccccttgcccttgctctttctgtttttgctttttcctttgtgttgcccctacacgtcatccaggatatctgcgccccccacccccacccccaccccaacgccttgtttcttcttttaccacttcggtctttgtctgttgggggtccctccctacattgacccattgccaaatgaaccataagagagaaatgaattaactttcaggacaggttacgttaatggtatgaacgtgcacattacataaacctaaattaaatagggcttgcagtttgttttgctcgcggggctctttttttctgttaggatttgaggaaaagttatccccacacttaactgcagccttaaagctaagtgcttcattagcagagaggtacaacaagagctgaaaactccctttttcttgtgcctaatctgttgtcccaccttctggctcaggttattcccatccctcatttgttttctcccatttcggcaatttaatgttgaagcattgagctgagagtctgagggtgtttagagagaacttgacgtcttcattttgcattatgttgagttgacttagactctcccattctgcttgaagctctggaaggaattcagggactgagaatacacttcctcagactcttctctggctggtttggggaggaaggatctacttgcaagggacgggggatttgaatcctggttttggtcctctctaattgtgtgatcttgggcaaattgttcctttttctgtgtctggaaagcaggggtcatcatcataatgcctgtctccctgggttgttgtgaggattaattgagatatgacccctcatagacgcataacagggaattaataaattgtagaatcctggaggtttatctgcagttgttccagggtctctctcccaaactgcccccacttcctaccttcctccaaccaaggcttactgagctttctgagctcctcttgccaagctttgggctgcgtatgagggctgattaaccagacatggtctcatgtctgattaaccatggccaggaatggtttgcaatctagtgggaagtctgactgagaaacaactaattttgtggaactttttttttttttttgagatggagtttcactcttgttgcccaagctggagtacaatggtgtgatctcagctcactgcaatctccacccccccaggttcaagcgatcgtcctgccccagcctccagagtagctgggattacaggcacctgccactacgcccggctaatttttgtatttttagtagagacagggtttcactac[139 bp omitted]ctgtcgcccaggctggagtgcagtggtgcgatctcagctcactgcaggctccgccctccaggttcacgccattctcctgcctcagcctcccaagtagctgggactacaggcacccgccacctcgctcggctaattttttatactttcagtagagacggggtttcaccgtgttag[136 bp omitted]ggctggagtgcagtgacgccatctcggtcactgcaacctcagcctcctgggtttaagtgattcccctgcctcaccctcccaagtagctgggattacaggcgtgtgccaccacgcctggctaatttttgtatttttagtagagacggggtttcgccatgttggccaggctggtctggaacacctgacctcaggctatctgcccgcctcagcatctcaaagtgctgggattacaggcttgagccaccgcacccggctgttttgcggaactttaaaaaattaaggtggccgggcgcggtggctcatgcctgtaatcccagtactttgagatgctgaggcgggcag[131 bp omitted]atacaaaaaattagccaggcgtggtggctggtgcctgtagtcccagctactcgggaggctgaggcaggagaatcgcttgaacccgggaggcggagcttgcaatgagcggagatcgcaccactgcactccagcctgggctacagagcgagactccgtctcaaaaaaaaaaggccaggcgcggtgactcatgcctgtaatcccagcatctcctgaggtcaggagttccagaccagtctggacaacatggcaaaacccgtccctactaaaaatacaaaaattagccgggtgtggtggcgggtgcctataatcccagctacttgggaggcggaggcaggagaattgcttgaacctgggaggcgcaggttgcagtgagccagattgtgccattgcactccagcgtgggcaacaagtgcgaaacaacgtctcaggaaaaaaaaaagttatattaaaaaggtaaacaggctgcgtgcatttgctggacctcaaaggatcagaggcacgtggtggaagcacttttaagaaggaggattgaaggagaacagggacttcgattcttgttaaaatctatctgctattcccattcagagaagaaacccagaaatgtgctgtagagtgagtctcctccctttcccaccccaccgcctttcctctccctcagtaaatggcaccactggatgacagtttaataattcccagaacaaaataacttccaactttgggctggcgatggctgggtctttagacatataagcaaccttttgaaagtgcctcttcccttttttgctcttcagtttttaaaaagttcaatttccaaattccaattgcggaaaggcggggagcccagccacagatgtcagagtctagagttttggatttatttgaattgggagattaaagtcagaaagccaaaggcatgctgacagctgaacaacagaattgtattggcagatttaggatgggtggtttgtagctaattggggccccagctgtgccctgggggaccagcagtttaaagagaaatcaaggtcacacagtgcccaaagtctacaacacattcatgtattcagcagatatttgaatgtgggaaacacagatgacaatcaaataatcacctcagtaaaagtacagctgtggatagtgctatatgtgtggcataggggagcctgacttagttggggctggacgaggccagggggagggttccctggtgcagtaacttctgaagataggccgtatctcttaccctattttccaagaccttcttttcttcctagatcttgtaaatggctgtttttcattatactttaagtatagccctgtctggggacagaaagatggaccagatttttctctgggtcacagatcatgggaaaaatctatttgttttgttttaaccaggattatcatctctgagcatgatcaaatacaaaaggaaggactggtgttgaagggcggcagtctcttggggctggaggaaaagggcacatttggctctctcgtctgcatagtcaaggcagggttgagggatcccttgccttcttggtttgaatcaagtctgacacttcatttttttgtgactcattcttgcctggggtagcagttcagactgtcctgggggttttgtggggaccaccttggaagaagactcctaggttggaactctaagcttttcactaggggtctggaagtccctgcccgcctgggagggtcacttgggaagctaacccaagggagcatacacagactgtgtgaagggcagagcaggaaacgtttctgctgtcagacagcagccaggtaaaagcatcagaggcttgtgtggtgtggctcatctgggtaatttcatggccctactgagtttcatactctatctgctggcccaaatgagttggcatcacaagagtttactggctttttaactttgtagagcattaatggtgtgtaagtcccatgtaatgcccagattggatattttaaatgtactggagagtggcaaactgagtaaggtgatttaaaaaataccagctttacatggcagtgtggtttcactgatggccattcattttactcagttaacatttatcaaggatttccagtatgctggagctgtgagtcctgtagacactactgggggtggggttggggggatctggaaggccggacctttgactgcaagaagttcccagtcttatggggatagagactcatgaacagtgtgataaaatgccattccagagaaaaattaagttttttgtgtgctgggagaagggaccaccagctctgttagggtcctactggagctgagtattaagggatgagcaggcatttactcatcccttaacgaataaggtaggcagagaagggtagggtaaggcattataggagctggaataatgtaaggagcacaggataatgactgagtttgatctgtaggaaacaggtttggagtagggtggggaggtgatgacaatataaggagagttggacccaggctcttggtgccacctgaagggttggaccacatcttgtaagctactaggaaaccactggaggttttgaaatgtgaaagtgtgtgatcaggttgtgttttataaacagaattctagaatgggctggagaggtaagagctgagtcagggagacctatgggaagctgtcgcagtagtccaggatgagagaagatggggttcacagtgctgctgctggtgactgagggtggcaatgggagggtgcatctaggaagcagaaccaactgtctaggggacaaatgaagtatgacatagaagggagagcataaagggggtttcctgcttgggcaactggaagcaggaacagaattggaatgaaggtgacaggagtctcactacattgcccaggctggtctggaactcctgggctcaaatgatccttccacctcagcctcccaaagtgctgggattacaggcatgagccactgtgcccagcatggagacatcctttataaaggggtcaagggttcaggagtagaaggcacaggtttagagggcttgagagggtgtgggtaagaaggcccaggggaacaagaagtcagaggcacatggcagaagcactgccaagaacgatggaaggagaacagccggggagattgaggctcaaacagagaggtaggagaagaatccagagaaacacagtaaagcccattaaggagcatttcagatgaaggcaactgaaggcagcaccaagtccaaatagtgttagcattcaaaagtattagtgtttgtggctcacatctgtaatcccagcactttgagaggctgaggcaggtggaccacctgaggtcaggagttcgagaccagcctggccaacttggcgaaaccccgtctctactaaaaatacaaaaattagccagcaatggtggtacacgcctgtaatcccagctacccgggagggtgaggcaggagaactgcttgaacctggaaggcagcggttgcagtgagccaaaatcacgccactgcactccagcctgggtgacagggcaagactccgtctcaaaaaaaaaagtattagtgtttggacttggcatgttggagactgcccgtatttttgttaccgaaaatcctggttatgataaatgatattcatgaagcattgccagaaggctctgtagctcttccatccctctagagcagtggtccccaaccttttggcaccagggaccggttttgtggaagacaatttttccacggatgtgggggatggttttgggatgaaactgttccacctcagctcatcaggcattagttagattctcataaggagtgcacaacctagatctctggcatgcacagttcacaatagggttcgcactcctatgagaatctaatgccgccactgacctgatggggcgttttgaaggctgacagaggaatactttctcctgaggcaggattcggcaggcagagcatcactactacatggaaccaggactttaaaggctgagagaattctagagatcatgtaggattatcatctgacgtataagcccccgaaaccaagactagaccctgcatccagggttgagatgaatggttgtttttgtttatgaaggagcgtggtttcttgagtatccaagctggtttttattaccagctggatggatgtgaagtcccacctggttccagtgctgtaaaagaggtgtctagaaaatgatgattttcctgtgggccttgcacatcagctccttggcagctttaatagacgattttcagagaagttttagcagtggccccgtcctgagattagtagagtcagtgtagaccacagagataactttttcaatacagtaagtgatggagtggtctgtgttaggaatgacagcaataatatcaggtccccagctaagccacagaagcctacttaaaccacaatgtacctttaagtcgattagtttaggccctaacctcctaaccaccgtgagtcaacctgggggacgggaacgccattccttttggtcttgtgaataggaacaattcctgtgctttttctccctcactggtaagggtgactgtagctaatcgggattattgagtattagccatgtgctgggtgctgtgctgaatactccaattgcgttatctcatttcatccttctgtctcctgcaggaggtaggctctattgttatctcctttcaggcaatttgcccagtggtaatgtagctggtgagaagaaccaagacggaatccaggtccacccacctctagatcctgcactcttaaccgctgggcaacactgctgcccacctctctcattgggcgggcacaggtctctctgtgctctctgctctaggctcaggattctggggagagtaggatggggaaggaggacaactttcccagtataaaggccttctcacaattccacctctctcttttttctgtctcccactcccagaagtagcttgcctcctcctttctgccgccaccaccatttagtgcctccagccagggctgctttcattcttcacagatgttgggacaggctatggctacttagtcacgttcctaccctcccgtccttaaagttagcacaaggtccctttcagtctttctaagagtttttaatttgtttgttttttaaacctagaccagcagtgtaaagaataggcatggatgccaatgacaggcctttgagtggcacccaggaattgtggttttcctgggcatcacagcacgggatgagagtggaggtggtgaggagagaattgggttagatggagtctcgggacgcagagtaagttcgcctccttcctccttgcttggagagggagggaggggccttatcacatgtgctacctgtgcaggtaggtggacctgtccagtgagcagccaatgggaagcagaggaggttcagttcagtgatggtgtttagcttctactgtgtgtcctgtgctgctgagttcatggggtacaaagatgactcttggagcctacctctagtagaggatacagaggcagaaagggtaatttcaatttcagtagggttaagatggaggtgagcacaggagaggccactaagcccggtgttgaggtgacatttgagctgagtttcaatggacaagtaagggccttgtgaggagagatggaaaggttgtatcagcctgaaggaatggcatcagcaaaaccatggaagcgtaaagtgcaagcgtggtgtactgaggggacctacaaggagtggtacaagttgccaaatgcctcctaagagagttcctgacacatggtagactcttaaatgtcatttcaataaatggagatggaggataaggtatagaggatgagatgagtccgaagctatgcatgggcgttagtggtaatacacacctggaatgtattatgtggttactacatgccaggcacatatgctgaatacttttctactaacttagttcatcctcatatgagccctatgaagtagatattattgtctctattttttgtgaggaaagtgaggtccagagaggttaggtaatttgtccaaggtcacacagctagtaaatgacagagctgagatttgaaactagttccaggtccttttttttcttttttctttttagggtttcactgtgttgcccaggctagtctcatactcctggcctcaagcagtccttctgcctcagcctcccgaagtgttgggattaccgacatgaaccactgtgtccagccggtcctgtctttttaaccactgctctgtgttgcctttctgaaaactttaagagtgatgacgtggtcagatctcctttttaaatagacaacactggctggcatgcagtgggtggatttgagggggaaagaggcccaaaggcctgccagggctgtataagtcagagatgcttaccttcaggctgttgagagcatggccactgaggaagcacctcttagaaggacctcaatactaacgcatgcctgtggttcctccaatattattgccgccttgtctcatcttgaaaagagaattctagatttggggagatgtcccagtggtatcatctcaaagagatgcttgaagacaagttaaaggatcctaatggaaggggcaggctggaatttggctacacacaggcatcaggttcaacataaataggaaagaggaaaaataggatgttcccaaaggaccccaaactccatgtctgtctgaactctcaggccttctcctttttctttttctttctttttttttaagcagcagcatctgtttttctcccccattggccattaaaaataatagatgaaattttggtgtgtattgtgcgccagctctgtgtaagcactgagatcatctcacttaacacctagaacccctgtggaggttggtcttattagagatagggaagctgagggtcagagtggtttcgtaacttgccagaagtcacgcagctagaaaggagcagaactggtttgtgtgagtccagagcccacttcttttccagtcttcacctcctctcagacaccccatggaaacaacaacacagaggcatgccttggggccagccttgtctcatgtctggaggaattccttcctgtagagagtcccacttctcaggtcagtttccgtggctcggcatgtggtggtccagccttgcttccacatcattcctcacgttcctttgtggcttaacaagagcgtcccatctcccgcccctccatcctggtggcactcagaaggttctgttttgagttccagcggcagttactcccttttggggaaggcctgttggccggggaggcggcatggggtgggggctggccaggttggcatgtgctccctgtgcatttgtctctcgaggtggtgtatcgaagatctttgtttttaatcataatatctcacatattttctttctgtgctgctcagtgaaagctagctaggggtggcggcaaatcttcctttaatttccactgtgatggattattagttcacttaaaatggtgtttaatttgcacatgtgccctgaggcttttaaatattaagctcatttgatgactgttggaaatcaatttggaactccacagttatgttctatgagttggactcatgaagccccatggaccctgttgccccattaacaggggctaaagttcaaaaattagaatgatgagttaagctc[307 bp omitted]caaaaaaaaaaaaaaaaaaaaaaaaatcaattttctttcctaagaattgactcaaagaagcttttaaaatttttgcttaaaagggaagaagacagtgcagatgttgattttttggtccccatctctcagcttgttcctctcatgcagcctgccctcccctttctcagcccacaggccttttttttcttttttttttttttttttttgttgagacggagtctcgctctgtcgtccaggctgcaacctccgcctcccaggctcaagtgattcacctgcctcagcctctcgagtagctgggactacagctgggactacgggcgtgcgctaccatgcctggctaatttttgtatttttagtggaaacagggtttcaccatgttggccaggctggtctcaaactcctgacctcaagtgatctgccttggcctcccaaagtgtctggattacaggcgtgaccaccttccccggcccccacaggctggccttttgttttgttttgttttgttttgagacagaatctcgcactgtcaccagactggagtgcagtggcacgatctcggctcactgcaacctccacctcgcaggttcaggcgattctcctgcctcagtctcctgagtagctgggactacaggcacacgccaccatgcccggctaatttttgtatttttggtagagacggggtttcaccatattggccaggatggtctcaatctcttgacctcgtgatccgcccgcctcagcctcccaaagtgctgggattacgggcatgagccactgtgcctggccctacaggcctttcttgatcctgcttctccttgctttctacttacctcctctcatttcttctagtttgtcctgtaccagttgaacaagattcatatttcagcaagccgctttttcttccctttttcttttctttttttttaatgctctgtcacccaggctggaatgcagttggagtgaacactgtgcactgcagtctcaacctcctgggctcaagtaatcctctggcctcagcctctcaagtagctgggatcacaggcgcgtgccaccatgcctggctaagtttgaattttttgtagagttgaggtcttgccgtgttgtccaagctggtctcgaactcttgggctcaagcaatcctcctgtttcaaagtgctaggattataggtgtgagccaccgcatctggcttttccttttttcttcttaggaaaggagtccctctctaggatgcctgtttattcatatttaagagcaatggggagcagagtgaccctgccacagcaaaatgtaaggcttcttgtctaggccttccagagcctttctagcaccagacagcctgggccattgcttatatggtagatttttctcttgtctttttaggttcagagctgtggtgaggatggaatgtgcatgtgtgtgtttgtatgtgacacactcacatttaatacaaacaagaaatgcttatttcacagaaggtagctttgaataagtttcgggattcagatttgaagctgaacataaccagaaacttctacctgtaaactttttttgggggtttccttcagaggagaagtgagagaagaaataattctactctggggaaatgtataatttagaagctgtctgcatgtataagaaaacagactctgtatctgctctctaaactcagcctggcagccagggtcattgtttctttttctcccctctgtgtttgtgtaagacggatgggtctggtgctctttgtgctccccagcgggcagctaaggctgtggactctagcagcatttggcctgggggaagcctactgcttgttttcccctgcctgtctttcctatttccttactctaactcaccaccccttcctttcctggatgtgctgtctatcctgaaatggaacaggagtattagaaaggtggaagggccaggtgcggtggttcacacctgtaatgccagcactttgggaggctgaggtgggttgatcacctgatgtcaggagttcaagaccagtctggccaacatggtgaaaccctgtctctactaaaaatacaaaaattagccaggcgtggtggcgggcgcctgtaattctaggtacatgggaggctaaggcaggaggattgcttgaacccgggaggcggaggttgccgtgagccgagatcatgccactgtactccagcctggaagacagagtgtgagactctgtcttaaaaaagaaagaaaaagaaaggttgagggtatttcaggaaactccaagcagggtacttggctctaccaccctttctatctgtaacactctggcacccaacagcattggtcttctgtgggctgttttgtcattcaccttacctgctacccagagtgtgcccagggtgtgatgaaggggttctggatccaaaagtttatgtatctttcgtcctatctcctgtgatggccagacctaactgaggcaaagccgagagaattatttcccacttccatttccttcaagtgttgctataatgttcactgtaaactgattttacatctttaaaactagaggtgggagactgagcaggggcgacatcatacattggcccccaaaggtctgaatcccttcaacagtcagatagctcacatataattggtcgctttgcatgaggagcttccttggctcagggctgcagaagagaagtgctctcactgtgggttaaggggtggtggctgatattgtccttcagcctagtgctagttagttagttggccactcaggaaggtataaagtgtcccagaagtatggcggcctcagtgactgttttggtgggaaggattccagggaagatggcagtttcgccttagaagatttggttccagggaggtttagaggaaaaagaggacgatgatttgcaggctttctctaaagatccagatggatcccagacgtagtccagccaggaagatctgattttgtttgtcttccttccccatctccctaaataatttttaattttatcttcaaagcatgacgcaggtgttaattaacactgcctgctctcctgggaggtaggcaagtggaaacaccacccctattagtgaagcccaggggatagcaggtgcggaagccttaggcaggtgagccacagagaagcagagggagtcttagacctcgtggccctgccctcagacctttactgggacttgctgctcacttagttaccttgggagccacctcactttctcattgtccttagttcccagtaaaagagctgaggctgtggtaggaaagatgtatggtcctatgggatgagtaatggaaagtctaagggctgggagaaattctggtaaaattcactgttactgtgaattttagatgcaggattctgattatgccattgatttcattcatttggtttaaaaaaatgtactgagtatttacttctgagtgaggtgtgttataaagagaatcacttcttctgaaagagctggcttagcactagggatcctgctgattgggaacttgttcctttatatcccatgctcaatctctaaagcaaaggctggggtgtggggtttgctgcctctgcaggtgatggcttcaagcgttggactcttgacatctggaaatagatgagaaacccaggtgtgactgttggatgtggtgaacctctagaggctgaactttcccttctcctttaaccactcaccttggttggctcaggagagggggtccctgaggagtcctctccctggggctgtaggtggtagcacatcttcaagcctgatgttatctagggctgcctgggaatgatgataatgtgtgtgctgggtgtctaatgaaactgctgggatgatactgaacttcccactccagaaaagcagcgagactggagtctccagtggtttctttctcattcattgggtatcttgggcatgataccaggaacagagaagtgggtcatttgatcctgtcagtgttgccttcttcatgggtggcagttggattctgcttgctttgtagggagccctgctccatcagccaatgttagtcctcttcccttgatgttacaggctgctgagaactagccctagacctctgcgtgagggttcttctgccgaagacatcaccagtgtgtggagcctgccacacccacccgctgccaaaccacggcctttacctgtgtcttccggtgtttcccgtgcgacccatcctgtgggagtgcctcgtgggctgccccagagttcaccccacactcagcagcaccaatggtgaagatgacaagatcgaagactttccaggcatatctgccctcctgccaccggacctacagctgcattcactgcagagctcacttggccaatcatgatgaactaatttccaaggtacacatttccagcaggccttccttgcctaccccggggagggcgcttagtgctcctgaagttgcagaggtttacaagctctcaagaatatttgtactccatctttgtacagggagggctgacccacgtgaccgtctcactcaactgagaaaaactctgagttggagggacagagtagtcatttaatttgttattttggaaatgaggtgtcatccttgttggaggctttgggagctggcagcttgcaagccagagaagggaggggctggggattgatgggagccttgttctcagcttgcttggtttaggttggcggacgaagagtgaagagtgctccctgctcagaaggtgaattctgataaagcaggggaatgtcttgtaagaggggttccttagcaagatgagagagccaccaggaagttgtgagactgtggaattactaaaatgggtggcttttggcagggaccaaaagtggcttgttgaagagctgaccttctggcctgtgggggccgttagggctcatacatgaggtaatatggcatgacatttgatcatgatcagaagaatggaaccctgtttttcctgaggtgcttaggcagctgctttctaaagttggggctgggggattattaataagtaaataaaccaacatgccagttgtgcagttcaggaaatggatccttcagggagcgttctcaggggaactgcttccctcctggccctagattcccaggggaagagaaacaggttttactaggctgcatgacaaagagaaagagataatgggagacttttcccttacaaaagcatctttacccagaacctggacttcacgccattaaagtaaaaaaaaaaaccaacccatctttacgcagaccgagacgaagttttttgttttgtttttaaatgtgttcctcatctgtttacaagacctgctggaaaaggtggctgttgctttctttgcctctggtttggtagccccagccagagaggaatgaaggatctagtcagctcttgtagaacagtcctctccagctggctgatttgacctaggaggtgaagaaagctgcccaaacaaacacatctgtagtagtgaggcttttcaaatcgggcctgaggaccgaacctcttgttctagccttactccagggtctaaggtgaccacagagcttgaagcgtacagccccttagagtcctatcctctggccagacttgtgaatctgccccactttcctttctttatggttctgctaattcctctcctttatgctgcttatgtttcagccagcctttagcttccttctcagcttcccttcgaattttggggaaccccttgagtctggaagtttgaatgtgtggaggtgtcagtgagagaagagaggagttggtctcttggacgttggaattgggtttgcaaagttgtaggggaattgtgagttgtccttttttttttttccccccctttggaaatctccagagaaattatttgcctgtatctactggggaagccaaggcatcatttttttaatgcaaggaagcagtgccatgtatcataagaaattgaggtaccaataaggtattttagcaccctttatgtactaaaaactgcaacttgacactttatcaatgttaacttaaccttcatatgaagtctttaaggtagttgacatgagtcatactttatgcggatgaagaagctgaaactcataaaacttgtccaagatgtcaaatcagaggttcagagaagagtgattactttgagtgggtgttcaggagggattgctggaggagatggttctttgatctgggccttgtaagatgggcagaagttgagtatgtggagatggtaatggccttcagaatttatgtcttatctgtttggcctggcatacaaggcctttgacaatttggcagagtctggcttttttggtaggtctccagccagctcttcactttgtttcagccacttggaaccaagccacatcgcctgaatatgcaggtatgggtgtttcagggctctgtgccttagccaagagtgtccgttctccttcacctccctcctcctacacctccctcctctttctcctgagctctttcttatacatccttgggcatggcctatatctgctttacatctcggggtcagaacctgacccatggcaagagctcagtaaatgataaatgaatagatggaggttgagccttggagaagacaagtaatgagaaaaaaaaatactttgttggcctcatgtccttcctgtcccttttggggcagaaaggctcattcacaagtccaggccaaagtcagcacaggcttcaatttcattggctcaggccggtacacagatggggtgcattagagcttgatgatttaaagggttgggtgaaatgcctgactgtggggagagctgagggagctgtggctggcattgcacaaagcttcctttatttcactccacagccacccccggcgttaaataatctatagattcttatgcaggtctgcctaatggaaagatcattgccccagcctcctccttggaaaataggcctttcttttcatttttccctccctcttccatttaagaaagttcaaggagagaatgtctctcctgttctcctctcttgacttaatctcctatgcagtttcagaatctgcccagtgggagttaggagctgggaagcagataactggagctggatcagcagtgtaattaaatgatactttgtactggtaatagggcctttcatctgaaagcttgacattcgtttggtgcaaaaaaaaaaaaaaaagtgagtgctttcattatgaagaaggggatacaaaggtctgagtgtgaccagcagtgaactgggactaggactagaacttcaggctcccttctatcagtgtgcctaagcctacatggaaatgtatagttagaaagtttttaaaaacaaatggagtctgtattgccatggtggtggaaagaatccagtaccaggctttctaccttcacagcttgctttagatccctagaggcctagttgcttgcaatcaattgtccaacttccaagcctcagtttctcactcatacaatgggtaaaataatgtttactatgtttaatgctgtcttagtccattagggctgctaaaacaaaatgccatagactagttagcttataaaccacagaagtttatttctcacagttctggaggctgggaagtccaagttcaaggcaccaccagattcagtctggtgagggcctgctttctggttcacagacagctttttcttacttaatctgacatggtagaagggaagggtctctctctgtcctctttataaggacactaatcccattcacaagagctttgccctgatgacctaatcacctcccaaaggcctgatctcctactgccattatctttggggtgaacgtttcaatctatgaatttggggaggcattcagaccatagcagatgtctctagcagccagcacctagtgtatgctcgtgatgtgctatcccagcaacagtcctgtggagtgggcatgcctcactggggagagcaggtttatttcattggattgttatgaggctcagctgagatcatggatgtgtgggtggtttgcaaattacaaacctttatgtaaatataaagtagtctgtttgcttctcttggccttactgtccaaaagaaaagaacaaaaagacaagggggtgggttggaggggattattcctgcctgacaccaactagttttagtttggctaagatggcttcactttggaacctgaggcacaagattggatatgagaaggggtaatagaaagccaagtgtgtctgtagaaaggtaacatggcattttctctgtaaaatggtaaagagggtagggggaaaaactcttgaattgatgacagaactatctagggaatgtgctgaggcatcctacaatttttttcttagggggtgttgtggtctaaatgctggagtgtttgcacacagaggtattttgagttggcatgaggaattgctcacattgttgtttcttccctaatggtacaagccctagtataaaaatatactttgcttataaaataataatagcttcaattggaacagttagtagccagccctagtgagaataatctaaacactcattttagtggacataatctattatggaaacctgggtcttcacaaagcttttgtatgaaaattttctgtctgtcatcctccctttgcctccctcctgccaaccccttgatggcattgtggagtaggccatttaggaaggataaattggattaatctatcacagacccacttcggggccctgtgacttcatgccaacacacggttgctttagtgctctgggtcctggaggaaaggagtggtagggtgctgtagaggggtagtccagtggaggtgggatgaggaaaccttttgctcagtctccaaaactatttacgctattgttatgtcagatctataggtcagattatcttctggtgacaaataaggaatttctagaattatgggtcatctcattcaagcctctcttcatgaggagacaggccatgggtgactcagtgatcagaatgagatcacacagcctcagagccagggccatccacctcatacccctccacagtgttctgtgtgaggagccctggcctgacttgttttcaagctctgggcagtccttctgaggttgggagcatttagaaggcaggtggtttttattccctatggggttccattgggcttacagtggtgacattttggttttcccttcctgtctagagattagatgcagcatttctttgagaagagtcagggagtgagatgttctgaatccttgtattgatctagtggctgccaagaggtagactctgcccttggtttcccacctctggctctgagccctggtgttgtacaccagtgtagtgtagtgtagtacccccatgcagtggcgtaggggcagtgctaaggaagtaccgagatctgacccatcctgtccactctacctgtcagggcaggtagagtttctcagttcccacggctcatcagtttgtggttttttttttggttgttgtttgtttttctatttttttgagacggggtttcattcttgttgtccaggctggagtacagtggcacaatcttgacttaccgcaacctctgcctcccaggttcaagcgattctcctgcctcagcctcctgcgtagctgggattataggcgcccgcctccacgcccagctaattttgtatttttactgaagatggggtttctcattttggccaggctgatctcgaactcctgacctcaggtgatccgcccacctcggcctcttaaagtgctgggattacaggcgtgagccactgcacctggcctttttttttttcctttttctttttttttttttttgagatgaagtcttgctctgtggcccaggctggaatgcagtggtatgatctcagctcactgcaacctctgcttcccgggttgaagtgattctcctgcctcagcctcccaagtagctggcattacaggtgcacataaccacacctggctaatttttgtatttttagtagagacgggattttgccatgttggccaggctggtctcaaactcctgacctccagcgatccacgcgccttagcctcccaaagtgttgggattacaggcgtgacccactgcacccagccagtttgtgtttttaatgtacaataaaactactctctgaaatcttgatggaattatctgtgtcctgaaaacctcatgtaaataataaatataggaacataatttctaaaaatcccttcatttcttttttttctctagatgtctggaaaacggtatagtgagcattgagttatatcactagtagtgttgttagtggctactgtgtcacatcagacagcataattcataaaggatatgtacaatattatcagaccagaatgccagttagcaaaaattaaaaataaagatgaaaagaaataataaagaatatatacaatatgagatgtagcccttgaagataattattctatgaacttatctaatttgcaaaataggtatttttagccctaattttgttaattgaactctaatttttgatattcagtggatatatgacataatgatttttacaaaaaccatactcgaataaaattcgagtatgttttaagaggagggaaaaatcagattgcaggcataaatgtctatctcaaaaagtaaaccttttgtttctagaatagtgggacctggctctttgccagagcagtggtactaagaaacagaagggtgggaacaactgctctgtatggcctgagctctagtgggtgcctctgccactttgctgttgaatgtcagtgtttcttttttatttatttttttgagacggagtctcactctgttgcccaggctggagtgcagtggtgcgatctcggctcactgcaacctccgcctcctgagttcaagagactctcctgcctcagccttctgagtagctgggattacaggcatgcgccaccacacccaggtaatttttaaattttatttatttatttttttgagacggaatcttgcactgttgcccaggctggagtgcagtggcacgatcttggctcactgcaagctccgcttcccgggttcacgccattctcctgcctcagcctcccgagtagctgggactacaggcacccgccaccacgcccggctaattttttgtacttttttagtagagacgggtttcaccgtgttggccaggatggtcttgaacccctgacttcaagttatctgcctgcctcggcctcccagagtgctgggattacagacgtgagccactgcgcccggccgtgttagtgattcttagacatcacttctaagctacagccaaggcagaagtgacaaattagggaagagttccagcacaacccaataagtccagttgcaagacatgctctaccaagttggcttttataaagagaatcacatttcccaaccccaaattacttaattattttcttcaactatgtgacctttgaaagctctgtctcctactaatgaagcattggctcttttgtactcctctagaagtatctgttgaccacccaggaaggggtggcaggtgaatcaaatctgtacagaaagtctccaaacaaagggatgtggttactttacagtgtttcttggtgaaaagaaactatttggggctcgtgtaaagtatatagtatcttatggtacctttcctccataggggcagagattgaacccgttcaggatgaaaagagccatgaattaggctgggattttttttctctttttttgatataaagtctcactctgtcacccaggctggagtgcagtggtgcaatcttggctcactgcaatctctgcctcccgggttcaagcaattctcgtgcctcagccacctgagtaactgggattacaggtgtgcatcaccatgcccagataatttttgtatttttagtagagatgaggtttcactgtgttggccagcctggtctcgacctcctgacctcaagcaatccacctgcctctgcctgccaaagtgctgggattacagatgtgagccaccgcacgcagcttgggataatttgtatagcacggttggtccacagtgggaccattttaactatatctgaagagtttctggtgtatgtgggtgacggcagtggggactgtgcctatacttgctcttatcatcttattgattccattctgtctttgcacaaatactaattacgtactctgtgtgtgtgtgcgcgtgcatgcacatagcactattctagatattataatactactcaaaaattttgtcagggaacttttatcctagtttgggagataatagattcatgttatgccttcttgaagtttctacttcatcttatgtttctcttaaagcagttatcacagtgtgatgacgcatgtttcccattagcctgtgaattacttgaggagatgattgtgacatcgtttttgtgtctctagcagcagcacagctcctaagactggtagattctcagtgaatatttgagtgaatgacttattactcagatagagatctttatcagtgagtttcaatctgggtccgtggactggcttcaaggactccatgaaattgcatgtgtcattctgtgggcatgtatatttttctagagagggtttcatggctttcatcaggctctccaccaaagatactgttggttaaaaaaggaaaaaaacacacacacaaccaaactttaagatccatctttctagaaaatgcagttctgggaagacttggtggaagaagtggcattgaagtgtgcctggaagcagaagcctcaaatgatggggaggagctggtaaaaggagcatcaggaacaaagagccagaggcagggagcacacagggagcagccgttctttggggtagaggttgaaaaactgtgaaaacattaaaggtgtaggtagaagccagattattagaagaatagaagctaggatgttgtcccattgacagttggttgctactgaagacttttaagcaagtaatgacatgaccagcaaatggttagtgctgctgtggtgtggtagatgaactagtgaggaagagactagaatggggcaagtggtgtctgtccattgcagtggtccgaatgtgttccaggtacatggtggtcattcagcaaatactcattgaccactgcttggcaaagaaatagaagcattctatggtttttttttttttttaattgtgtttatcatgtgtaggcatggacaaggggaattgggttcaggaagtcacatgctttaaatgggaggcagacctgtcgcacagtcacgcctgctccctgtgaaaattaatgatctgggcacacatagagttgctcaccaatttagtatcaagggagctgctgggaccaaatctggtgaatcatctttatgttttgtttttcttttgctgcagactgcaggcagctggagcacaaaatctgctcaaatgtgattctttctgtgtggttactttaaataccaaaaggaaatgttgacttgagcgatgaggcgtaccctgaaaattaactctgtggtttgcagatgcctttaaggttccaatcataagactggtttgtatattagcgtctaggctctcagcagggacactggtaatcaagcttgtgttcccagtcagaaatccaaagaaactctttttcatcagggtgttcaacctgggaagcaaggagtgggtgcaggatccctctgtttctgtttgagcagtggcactccctctggcctctggaatggtaaatctgcaccattgctagcttggctgtttgcgtttgggggctgactagaatccactgtcatacactacttgttcagttcaatatttcttgtgctttaaacaacatttaaacctagatggtagggataagatgattcctgcacttaaagagcctgtgatgtttaggaaacaagggaatgcaaggctcaccatggagggtagaagaatgttacagataaggttgtttggtgttgtaacaaacacacaagatggaaaatctatgttgctgctattagctactattgattgaacaccttcttagtttctatgtatatatagatatatatatagagagagagagagacagggtctcgctatgttgcctagactggtctcaaactcctgacctcaagcagacttcccacctcagcatcccaaagtgttgggattacaggtgagccaccacactggtcctaaagacttaccctttttttttttcttttttttttttttgagatggagtcccactccgttgcccaagctgcagtgcagtggcgtgatctctgctcactgcagcctccgccttttgggttcgagcaattctcctgcctcagcctcccaagtagctgggattacaggcatccgccaccaggcccggctaatttttgtatttttagtaaaggtgtggtttcaccatgttggccaggctgctctcgaactcctgacctgacctcaagtgatccacctgcctcagcctcccaaaatgctgggattacaggcatgagccgccgcacccagctgaacactttcctctttattgagcacctactgtgtgccaggaactcctttaggtattttacttactccatcacttattttacaacatcctttcaatgtggggattaaggccataggttaccaggttaccaagaagccagatgggttcagattcagatctgctcatgtactttttgctaccgcttcgcagtgtggcctaggttcttttggccttgcctattttatggtcttactcagtaatccttgtggcaaatcccaccctttcttccctcctgtcatttcctttgccttggtgaatccttctcctttcctctctctctattcagttcctacccattcttgaagaccagttcacatctttttttcttctagtgagtcttcctggcttataggatgctctgaatgtctgtagaactcactctctggttgttcatttggaaattaatgactgtcttgtggtatggtctgtgttgttatggttgcgtgcactttttatgtataattgtcttgcttcctaacaagattctcaatgtcctggagtcatagatgctcagaactttgtggctggaggtacctttgaacctggagtttctagttcaactcctcattttacagattaggaaaccaaggcccagagagaaactgagggcctcttgattttgcactttgccacctcccccgacacaccactttgcacatagctggtgcacatagccctgggagagggctggcatctggaagattgacagtgtcaagcgctgtgatcttgggcaagactgttcatctctctggctctcccttttcttcatttatccaaatgagtgcaataggttagactgtctttaaagttccttctacttcccccctgcgtcttctgagtctaatgtagtagcataagatgatatgaggccatataacatagcagctcgtggtataactccgagcccaacca[141 bp omitted]acctcccgagttgaagcaattctcctattcagcctcccaagtagctggattacaggtgcctgccaccacatcggctatttatttatttatttgtttatttcattttttgtagaagatggggtttcgccatgttggccaggctgatctcgaactcctgacctcaggtgatccactggcctcggcctcccaaagtgctgggattacgggtatgagccactgcgcccatccgcctttgcgtcttaatggcctcactggcaaatgggaataatagtaatattagatacctgataggatttttgtggaaattaaatgaggttattgatgtgaagttcttaccacagggcctggcacgtgataagtgctcaataaatgttggaagctagtgttattctatgaatagtcactaaagaaaaccaaatggaaagtgacagaactagggcctggcaccccaacaagcctggcactcttgcttgttgcccttgtttttggagagtctcagcagttgcccttgagccctacagttgtcatctgtcgtcttttgaggcctctcctcatggaatcgcttgttccttatcccagggggaccagcaggtctcaggaggtgatgaaatagcagcagcaccttccaccacagctttctggggccttacctgcaggcagcagcgaagcctctctagaatgtaaatggaaaagcctgtccctgcctccttcccttttagtctgtcaggtggttactgtgcctctgacccacccgaggacctcagttggctgtgacacagcagcccaggcggctggaagagaagtccctggcctggagagtgaagctggagctgagagttgcttgtcagtttgattccttctgtgacacttcgggtgggggggaatcttttgaaagaaaccactttctttatcttgaaagaacaaaaccaaaagagaatctctgataacctttgtttccaaagcactcagcaaagctgctgagaggagggtttgacctggtgacccagagtattatctctggggtaagggctgcccagccaaggggagctttagctgtttccctcctctccctggcttattgctggtggctggacagtgagttggaggaggagggggagaggaagagaggaggagatggctctgccagctgccgctagaaacaacaacatctaatcagtccataaactccctcccctccagactacagtgatgtcaagaggtggagcaggtggcactagttctcccctcccctttagcccctgacacctttgggtctttgaaggggtaaattatgatcatcaaaaggaaaattctctatctttgggggcccaggagctccttttccttcttgttagggttggctccaccaagagcaattttctgtttcctcatttatctgttgggaagctaactgtgaccttagcgtcccagcagataaatgaggaaacagaaaagtgtttcctcaccaaaacaaaaaatccctgagcaaaccctcctgcagagggccctgtcatttattccacattgtgtgagctcctcttacgtgttagaccctgggaattacagtggcaaacagatgcaagctttgccttcactgagcctgtcacacggtaccctttggttcctggaagacccagcacctgaaaaagcggttggtggcagcagcaacaaggatctccttcctgagcctggcccctaaggttatccggggcagctgaaaaaccagcatttccatagtgctttccattcagtttgcctaattttcatgagaggctgaagtgccttttgtttccctgatggtccctgtcctcccctgcagagtcggcctgagctagcccagccgagtcgggcagccccttgttctctgatgcatctttggaggaatgtctgtattctcaggaccaggcctctccccactgggtgggggctgctttgtttacattcctgaccttctgaaagctgccagctttatccacagctggcctttccccttcagatgccaaatgttccaaacgacaggtacaactctgagagggccgttaaggttcatgccagaaacattcacctaggaagcctgaggagagaggaagccagtgaaactagacttcatggagctttttgaagctcgaagcccccatatttcttgattcttcccgcagcgggagaaaaaaagaaaaaacacaaagtgtgtctgtgtgggaggagagttcctccctgtccatctctttctctataaaaacaagaggccaacctgctctgagcatcgtgggggcaggtgctgggtaaatacacgagaaaggaaagccaataagataaggtctgacaaatctaggtcacccggctgctgccaggtacctgtgtgactggccaccttgaaactgacaggaggagtatggacttttgttcgaggctcagcctggctgatttctcatgtctttgtttatttattcagtaaacattaattgagtgccattatgtgccaggccatgtgctaggtgttgcaggtccctgtgtgcctctgacaggcaaaatctcctcctggatcccaggcctgtaaccagggctaaaaaaagaaatgacttcattcaaaagccagttggttcactaacttccagagtaggggcagccagtcccttggtagaagggaggggctgtttgcagtcttgattccctgttttttgggctagatccaaaggtctgcaaaactttttctataaaggccagatagtattttacgctttgctggacatagggtctccactcaaatctgcagccacagagaatatataaacaaatgagcatggatgttttccagaaaaactttatttgcaaaacaggtgaaaggcccaattaggcccttggactggtttacttaaccctaggtaagatgattagaatgactgttgtgaaatgggtgttggagaaataggtttctgtgatttcaagaggaatctcaaaccagcatggtggcttgtatgaagagtgtaggggttgaggcactgtgctaattgacaaggtcttaattgacaccctggtgagaattctattccataggccagacttcagccccagccgtctagcacccacaggttcccaccataggttacaaggtgatcaagccagatagggcacatagtttcctacagtgtcatcactgtaatgggaagacagtgtggggccctgctgaggagagtctgtggcaccatttgaaaagccttgaatgagggtcaagccacctctgctccagacctggctttgtgctaaattttcagtgtggcattgagcaagtcacttaacctccctcatcaccctgcatatattaaatcctactgtatgaagcactggggatacagaaatggatacaaatacagaaatggatgaaattctcttttttttttgagacagagtctcactctgttgcccaggctagagtacagaggcatgatcacaactcactgcagccacaacttcccaggctcagatgatcttttcaccttagtctcctgagtagctgggactacagacatgcgccaccatgtccggctaatttttctattttttgtagagatgaggtttctccatattgcccagggtggtctaaaattcctgggctcaagtgatcagcccgccttggcctgccaaagtgctgggattgcaggcgtgaaccgtgcacttgcctggaattcttgcccttaagtagcttatgatctaatggggaaggcaaatagataaacagtgataaaatgtagtgaaacacagtcattgtttcactgtaagtgattgttccagatgttatgagggtaaagagcaggatgaatgtttactaagatgagtgtttagaagcatttactaagtggacaagaagacgaagacaagaggagtccattctgagcagagacagagaaacatgacacgaggccaagtccagggaccacagggaagacagatggggagtctgtgctttagggaagcaggtcagggtggatcatgcaaggcctagaaggccaaactaaggagtttagacagagttctggatgctgtgaggagctgctaaaaggttttaagcaaaggagtgataggattttattgagattggatgagaataaaacatagcctattttggaaaatcaacttctttagcttctgtaaaccatgtatccttgagctttgtgtgattatacaatgttgatgttgtggagtagtgggcattgataacatgccatagctgtttaaaaatagtcaggctgggtccctccttggtggtgccttcagctaaatagcaagcaggtagatcactggcaaacagcaggcagtcataactctaagaagagggcctttgttagttcatggaggtctgggggtttgcaggtcctgggccctctgtctcatctgacactcctggcttcttgagtaaggctccccaaatcattgaaagcgggcaattgcaactccctgttgatgagtttttctctaaatttaaagagagaattcagttgcagaattccagtggctttggtgtagccatgaggtttggaatacggccaagtgaaggtggaaataagtagcttctgcagtctttatgtatttagagaatcattgaaacaggcattggaaaatggggattcttggacagtgattcccaaatctgacagtacatcagaatcacctgagatacaaaggcagattgccagaccccacctcacagattccttttctgagggtctgagagtgttgtggaatcagggccctgatggccgagggaagcaggtcacctaggacacaagatttaaggagacactcactctcagagttgtacagtacagggtcagcaccccacaaacagtgcctccttaaatttcatgttccagccttctggctcgcctgaccctagtcccagacccactggggatctgtattttaacgagtatccctgtcccggtctgatgtaaccagtactaatatttgggagccacagctctaggacaagcgttctcagtacttggaagatacacgtgctgtccctaatgtccgctgcctgccatccagcactttacacttgtagtagttccctggaggtccaaagagtggttttgactgacctttatttgaaaaaggaaacagctctttggaggccttcttttaattatcctaacaatagccatcattttactgggtgtctactaaggggcaggcattgtgctaggcatgttatatgtgaatcatgtcttttgcctcagactaatccaaagagagatgtactactgttgtctccatttttagatgaggaatgtgaggctcagacagattgagttgaccaaggagacccagctaggaaatggcagaacca[148 bp omitted]actacaggcgcctgccaccatgcccggctaattttttgtattttttagtagagacggg[135 bp omitted]ctgatttttattatcaggtcagaacaaatgaaatagcagcaaaacggtctgtcatatattctggttttcactggtcctcaggccaggcaggctagaatgtaaattcaggcctgatctcagggtctaccattaagtgctgtatcacacaacctatttcttgctttgactaaacagaggaacccaacacaagcccttccattggtccttctcagactgtctgcctcgctttgaaatctccaggtaaccccctgttcctggcgtcttacactgggaccaaacatggcaccccagattgcttcggcttgtttctttgctgtttgtttcaatagggtttgctggcccatcgagccatggcacacagaggaggggcacaggtggccctcagcaggggcagagagttatccttccttaagctgtttgctgattaactcccttctctgctgaaaccagacaagaggaactcaagagtcagcagggctcagaagccccaattaatgtgtagtccaactgggtcagggggagtgaccctgtgcagtggcccttttttgtttttttgtttttgttttattttccccaggagcatgtgtgcccccaccttactagagtagagttccgcacactgggaggagggattccagcccccagccgagggagttagagctcctgtgaagcacaggcctgtctagtcggtcccttcctccctggcctgctggctgggctctggctggtgttaagttgccccaaatacccagtctcctgtttcacatccttaggcaaagatcccatggccaaggtgccctttcggcttagctttcccaccggctgcttgcagacagataagcttctaacagtagggaagggggaaggtcggaggtgggcagaatgctgagcagacccctttgtctgcaggcatagtgggctctgcagctccccagtatcgtgttggatggggcaggccctgggtggtgaccagctgcctgtccccaatcctccacttctttagtggcaggtggaacatggcttggctggggcacaatcgtacatatgctccggctttaccttggggtggaaattggaggctgaaagtttgtaagtgttgagaggcaagcaaactctgtgtttgtgtgagctggagaatgcaggggctgcctgagccaggctctgtctctgcagagtctgccctggctgtgccagactccctgtccagacctctcagagatgtttcattccttgggctgggttgaactgagacatagccctgccgcgagacaggagggagaaggagccagtggacagaatgttctcatgcctggatgcaccagccacagcacagactggggccttgggaattaagatgaaacctctcctgtttctttagccagtcaatatctttagtaacaaatgagattactgcctggatgaactggttttaatttacctttctaaagtgataaatgtgcttaaaatgaatatgggagtgacgaggaagtttgcacagttcacttcactggtctcacttctttggggaatgaacatgaactcttggacctgaattcccacctcctcctctcttcctgtcacttgtaaccaagtatctgaaacctgctggctataggaattattacattatgtggagtacttgatatcccagacagtccccaaggagaggtcccccatcatggcttccaaagataaccttggatgtaggtaccagagtgacagaacccagaaactgggcctctgtgtataagttggtcttgagtgtccagaggctgttttaaaatgtgtacagaaaggtagcaattaaatgtttgtcttggaataaccctggcctctgaattttcccagaagccctagcctggggaagatgattaaaaatagatctgagtagcacttcctgcttggcagatggctgatagcaaatgctaggcttgtggctgacctttcctttctgaaatctcctctgtttccatgatgctaattgagtccctctctaggcccaatcaaagactccttagctggttgcaaaaaagtaaaatacaaaaagcatggcttgctgtcctggctgggctcagttcatggagcaacatgaaagtgctggaatttgcatggaaacacccactctgtggtctaaccggctggtccttgtttagaaactaacaagttctgctttcagatttactgcccagtgctgctaaggatcccacaccctctccgctcccttcagtaaggaaatatttgtgcattgaagagtgataagaatgccctgtgtttagatgtgggcacaatagacaatgctcaccacacaaagcagatgcctaagagaggcaggagccttgtaagatgtgtgtcctaggactgactctgtccccatccactgttgcctttcctcatacccaaggtggttgtgagaagttaaagtaaatagtgcttatgacaatgccccgaggcagtatcagaacatgggacatacagtgtagtgttgttattattattttaattttttgacatgggctctgttgcccagtctggagtgcaatggcatggtctcggctcactgcaacctctgcctcccaggctcaagtgattctcctgcctcagcctcctgagtagctgggattacaggcgtgtgccaccacacacaggtaatttgtatttttagtagagacagggtttca[133 bp omitted]caccattgatttctcctcgagttgttattctccgtaggaaagagatggggatgtagctggactgtactgaggagtccttagcagcaaaacagatgcacttccagctgcttaatcatgataggtggagtaggttgccgggggcttctgctggctttcaaggcctcacagcctctttgaccttacttcctcttcatgaaagccctctgctgtgatcagccctcctacagcgctctcatctcctcctgtcccatccatcttctctgaactcctttaacagccataatttattgccgcgatttatactgctttagacttaatgtattttagtcccgttttctaggtggctagatggactagctatatactctctgcggtgcccagcaaggctccggacatggctgctcattagatatttgttgattgatcatcatggagacacaatatttcttcatgtggccctatcacaacattctgagtcactcccttcttgttggacacttgggtttccctgtaattttttttaccatcagagatcgctttagtgggactcaaagctgttttgctcaggagatgattttccaatgcttgatatttcacagtaagtcaggcacttgcgttggccaagaaagattgagcacccaaataagtggaagggatttatgtttctatgtctaaggatgggagtcttaaggaattatcagataaggtcggtcatctgatgagcagaaaagacttgctttttacgcagataaacaggaagtttgaaaacacaagagaagtctgagtcagaaatgttcatttaatatgcgaggcatctattctcttgagaatatggactcacagaatgttcacccttgtaagagaccttgctcaatcccttcatttcacagatgatgcaatcccagttcagagtatcggggttctagctaaggacaccatcctagttgaaggcagatgatctagccttgcctggcagggttggagtgggtagtctggttattctgacccagttatgttccatttctagagggaataccaagaagcatcagtgtgtgctcttgcattttggcaagcaccctatgctcaaatccttctaataattatatgcccatgtctctttcataaggctctttggctaggagttcttcagtccccaccataattcttaccaccatgaccctttcaagtaacactgtctcttccttgatactgtttcacataactctactcttgaatccagtcccagagggttggaatagagaggctgaaggtggatatatgctaatggcgctcaccagaggaaagtctgatgttggacaactgccacagcagggacagtcacaatgtacttcggtttgtgcatgtaacctgaagcccaattaattgtttcagtaaggcctggtgctttgattaacattagaaggaaagtgtaggaagtgtctagggaacaccttttagtatgaaatgaaaaaggtgtagaaaacaatagtgaacatggtcagaccaggccacatagggaaaatttgaagggaccggtaggaagaaggtggatattgttatcccatttcacagatgaggaacttttgacccgaaagccgaacaaaccaagagtacgtggcagaggaagtgctagaactgggaactgaacctagtcagtttatccaactacataattcttcattctaccaagctactaaactgggagaagtttagcccatagaaggaaaacctgatgtgggagagataagagctttaaatctatgacctgaagtgttacagtgccaaggatctaaagatggaggaatcaggaagctctaaggagaaagagctcagctcacataaggaattttggcattgtcagagtgattggcagtagaatgggcttcctctggaggtagtgagttctctgcccctgaaagtattcaaggagaggtttggtagaaatgtgggggagagccatgcttcaggtgcatggttgacctttgcgcatagggaggggtctttcaaatcccagtgtctgtgagtgtatttaaaactggataaagtcatgtatgtatgttttcctttgagatccttcactgtacccaaactacagcccactgcatgagattccagtggcctgtaattacttaaatatttctctttgcaactcctgaagcattcttcagtattctttgctagttctttgctatgtggtccaggtgccaaagcaagaagggatttagagtttcttagcttttacttatttgtttccaagagattttaaattagaatcattcattcagtcttgagatgaaaaagctgtttttaggctgggactcagagggtgttccctcggtggtcctcagacagccttaagcattgcaggtctacaaatttaatattatccgttcactcgagtgatcaagctctggtgaagtgattcacagtaacacaactcacaggaaattaatttggaaactgcaattctaattcattaatttacagtggagcagataatcctgaaagcttggactgtatgttgtctttgttgaaggtaaacccacttgagcgagagaattaaatttaggcgattgctaagtcaatatggaatcagagcagagaaatttgaatagcctaagagattttcataagttctaacagagtgagccatcctccttcatcagagagacagacttttccagtgaataccctctagaaaaattttgggacttagagtcaaaagctgtgggtttaaagttctgaccttgacttacaagctgtgtgaaactggggaagtttaacagctctaggcttcagtttcctcctctgtcttggaggttttatcagttcacatgtgaaagtgttttgcatattctgacatcctatatacctgtcagttttagtctcattctgtttaggctcccttctttttaggaagtcattgggatgacaccttcatgaccccatcttcattcttccctagactttagagccagactgcctggacctctgtcatcatttattgattgtgggtttgttgttgttgttgttttgagatggagtctctctctgtcgcccaggctggcatgcaatagcgtgatctgggctcactgcaatctctgcctcccaggttcaagtgattctcctgcctcaacctccctagtagctggattacaggcacccgccaccacatccggctaatttttgtatttttgatagagacggggtttcaccattttggcagactggtctggaactcctgacctcaggtgatccacctgccttggcctcccaaagtgctgggattacaggtgtgagccaccatgtccggccagatagtttgaccttaggcatatttcctagcctctcttctccgtacttttctcatctgtaaggtgggaagaatgattatacccacctggttttcgttgttttttgttgagaggattaagttacttcactttgagttactgtttgaatcctgccctagtacatggtagtcatcatatgagtgtgagccatgactgttatttcataatttctaactcatttttatgagccacctcagtctcatttacaaactctaatttcactgtagtgattgcttattagaaaatagtcaggcgtggtggtgggcgcctgtactcccagctgcttgggaggctgaggcaggaaaatcacttgaacctgggaggcagaagttgcagt[132 bp omitted]gcatgtggcttccattgtggagggtggctttctcaggcctttttgcctagattggttacaaaggaagtcttactttgggagtcggtaggttttgcccactgacttcatagacaacctttgaagtataagaacattttcattggccagtgcccatttggctttgggatcaggaatgcaaattgaaacataaatcaggaaattgatatttgttcttcctaggcatattaatttatattatcctttttaactctaacagttgttttcaagggcccgatggctttgagagacatttgagctccaatatttcagccctcctaaaggttctggcttatatttgaactgcagagggcccagctcttaatggctgactgcccttgcatcctggcaccaccgtcagtgtctaactcagaagctagactccctgaacagacctggtgaggatggcatgttggcctctcttctgtagaggatggggatatctgatcatgggcatcccccactccatccttctggacgaggcatacttcccatgcctcactccctctctgcaggatgctgagagctggcagcatctgctttcccactggctgcatgtttaccttggcatctgctgttctaaccccatgccacagactggagaggtttatcctgctcctggttcagcagagaacagcacactgccaaagccccatttgaagctcttaggacagttggaagaggtgtgggagaggagcttatggggtctaagccgtagggggatttggaagaatctggggtgctcaggctgaacagcctggcccttccagactagttttgcagctcccattttaaatcctgaaagcctgtgctggtgtgaagggaagcacacgtttattaaatgctttttatgagccacatttggtacttactatacacacaatcatttcatcttcaccacgtccctctggaatagggcgttattgaatcggcaatatgttcctcctttctgtagagaaccctgaggctcggaaggatgaagtgactggcccaaggtttatacagctagtgagggctggctccaggccctctcaggctccaaagccggcatcctttcccttgaacatcaggcaacacgacaccatgaggcaacagatcttataggatctctctctgtcccattccctaggcccatccctgaaagtggcttagttcccccaaaacacttctgataccttgtgactgagactcctaaaaggactctaaaagggcccagtttgtgtaggtcaacaggaagggaatttgaaagtctgatcattaaatggcttaagtcccagagtctcctcctttttttttttttttgagacaagttctcactctgtcacccaggttggagtgcagtggcgtgatctcagctcactgcaacctccacctcccaggttcaagcagttctcatgcctcagcctcccaagtagctgggattacaagtgcacaccaccacgcccagctaattttggtagagacggagtttcaccatgttggccaggctcgtcttgaactccctgacctcaggtgatccacccaccttagcctcccacagtgctgggactacaggtgtgagccaccgtgcctggctggatctctccctttcatcaataaaacaccagcacccaggccccctcaccaccttttgtttttgtagttccaagcatcgtgaatgttcccatgctcttggaattttatgactccacacagcagatatttcctcctttagagccagtggcttccctgcccctccctccatctgttgtgggaatgtgtgagtgcttggagactaccatagctcaaatccacgggaggaggggccttaagaaagccatccttctgcccctcggctttttacccccatctcaaaggttcctagacaggtgtgtgacagtctttttaaaatcataagcatatacagtggctttgttctatcctagtctttactggtgacctatgtccccatgtggaagacgaatagagtcaggaagttcttcctttataattaacccaagtctctctcatttccgtctgtgtcctcttgttcttactgcagagaagatggaataaatccccttcagtctttcctcttagctaaatgttcacagcttctttaagttgcactcgggttctaattctggaagtttttaactttgttctttatcatcacccctctcactttctccgtatgcatccccaaggctgaaatcttaaacaggatctagggctgttttgtttgggttccaactctttggaatggaacctatagcttactttgacccaatataggaaagctcaccaggcctaaccatggttggagaaaagaatggaaaaaggactgatctgacccttccctgcagaatgtgagatctgttgagttggaggggtttagacgacactccaagggcaaaggttttactaatcctcctttgtatctctacctacacacttctgatgccttctcactgagacgcctaaaaggagttaaaatgtatagtgcctggagcaaatccatagagaccgacagtagatttatggttgccagaggctgggggcacgggagacaggctggctgctaatggtgtgtgatttctttttggagtgtgaaaatgttctggaaatagtggtgatagttgcgtgaccttgtgaatataagaaccactgaattgtctactttaaaagagtgtgaatatatctcacactcttttgtaatgtgaattatatctcaatttttaaaagctcaagtttacgtttgtaccagtaagttttttttgtttctgagtgaactcagcacatcaataagtttggggtttttgttttgttttgttttgttttgacagggtctcactctgtcacccaatctagagtgcagtggtgtgacctcggcttactgtaacctctacctcccgggttcacgtgattttcctgcctcagcctcccgagtagctgggattacaggcatgcatcaccacgcccagctaatttttgtattttcagtagagactgggtttcgtcatgttggccaggctggtctcgaactcccgacctcaagtgatcacctgcctcaggctcccaaagtgctgggaaaagtgctgggattacaggcttcagccaccacgctcagcctaatgagttttgtttaaagctgcataatagaaacattctaacagtaacaaagtatatagtcttgaagtttatgaagcacttgataaacagtatctaacttcttttttttttttttttttttttgagatggagtctcgctgtgtctcccaggccggagtgcagtggtgctgtctcgacaacctgtgcctcctaggttcaagtgattttcctgcctcagcctcccaagtagctgggattacaggcatgcatcaccacgcccagctaatttttgtatttttagtagagacggggtttcgccatgttggccaggctggtctcgaactcctgacctcaagtgatctgccctccttggcctcccaaagtgctaggattacaagcatgagccaccacggccagccctaacttatcttttacacaaatcaggtgtgagtgagagctattttattatgcctgttttacagactagaaaattgtggctcagagaggttaatgagcttgttcaaggtagtaacatagctagtatacagtacaacaaggactcataccctggcaatatgactctttgaagcttgtgcagttaacactgtgtatgagtggtaaattggggaagcaagtgccaggtgctttaaaagcggtggattcacagaaaattgtaactggaaagtatcattgggagcttcagtcccatccctccattttaatggagacattgaattgcaaagtggggaagccttgccttttggcgtaatagagaaagagggagaccaaagtcaccaaagaaagaggtttgaagaaccaagtaggttagagtcaacctcttcatctctctcctccaggctcctgtaaaggccaaggaggagaggtagggactttttactttgtgcttcattgacctcacttattcttctcagcaaccctaggaaatggacatggtttctacttacagatgaaaaagatgtggcagctcagaggttaactgactcttccagggtcaagtagctaataagttgaagttgtaaagccaggacttgaacctgaatcttctgatgccaagactagatcctcttacaccgtgcagatatgcaagggatcacctagttcccagatgttagatggtgtggcaggtgggcgtctgctttccccatctctctctgcacctcctgaggcacatgcttggtagctgatggttgatcttcctagacagagaagggggctgaagtttgagaggctctgctcctctgctagacccttcatttagggagaagtctgttcaagtgaataggactccaaggtgaggacctgtatctatcaccagggggaagaaactcacacatttgctctgttgctgcctcctgcttcaatccagagtattcatttttcagtggttctcctacttttaaaaggagtttctgccttccagacttgcaaaggggcccaaaatccgtggttttggctactaaacaggaaactcaaagccctttctgttcctttgagctggctggaagggctgggcctggaactattactttactttaaaggacagaagaaaagttttgtgtggcttaaaaaacaaaacaaaaaccctttcctggaggcctgcacaccagccttggttgatacacaacatggaaaagagccgccttgttgcctggcagtaatgacagcaaacaaatgtgtctgacagtctgtttggcatctcctggtctgaaattctgtttgctttattctaattgcttccttaacttcctttcagtctccccaccttcggtaccaccctctctccaggccgtgccaggttgtgccaggctgggctgggccccacaggatccagcagcccagctggggctattcttgtctatctgcaagatgcctgttgttctccatggctgtttttctcatcataaatgttgacttggcaggggccccagaatggaacccatgatggaaaagtcttccagaactctgcctcaaaaaacacagctgatcccgagtgccaggccgaggaaacagaggttcatagatactgctcctcaagggaacctgagtggctatggccaccaggacagccctgagggggttcagtaccctttgtacatgtgggcctctccccgcagactctctcaaaacaggcctggaagaagccatgggcccttggaggtgccttagggcctggctggcatttctctgctctgccacgtgccatcctccaccccgcctctctctaggaattctaatctgtgtcaggccagagaaagtgactcttaggcccagcctggaagcagacagaaacccccagaacattggccttcacacttttaaaatgacatacccctatcagtaaaatgtttgagcataaactcctaatatatatgtacttatttatgaattacatatgtgtgctgccatgtaatatgtacattgtaagcatacaatttttaatgaacatttgtataatttaaatggatgaaagaaaaattagaaaatggttttaaattttattgaaggtatatgcaattggatatactcctttaaaaaaaatcttggttcatcactttctgatgcagtaattcaaaagacgtattctaatgagagggttgttcttgaaaactcttaggaaaagtggttttttggttttggttttgggttttttctgtagagatgaggtctcactgtgttgaccaggctggtctcaaactcctgacctcaagtggtcctcctgcctcggcctcccaaagtgctgggattataggcatgagccatcacgcctagcactgaaaagtgttcttacaatatttcggaaaaatccttcacaaatataattttaaaaagagaatttaaaaatatgaaaatgaacaagggttcaaacccctctgaaactctttgtttggaatagttttaaatagattagggaattgcttacaattcctaattgtatagatataggaattgagtgtgcaggcatagattttagaaatggattattattttacaaatttattgaattttaaaaattttatttttatatttacatacagtaaaattcactctttggtgaatagtcatacgagttttaacatagataagtcttaggaccttggagtcttatagtctatttagtcttacagtcttataaatacatagtctaggccgggcgtggtggctcacgcctgtaatcgcagcactttgggaggccaaggcgggtggatcatgaggtcaggagattgagaccatcctggctaacacggtgaaaccccgtgtccactaaaaatacaaaaaattagctgggcgtggtggtgggtgcctgtagtcccagctactcgggaggctgaggcaggagaat[137 bp omitted]tatggtctaatagtgattataagactttcttttgttatagggcctaagagtaccattcttctgttaccaagataacagaacaattccatatctcttactaactcttatagttaaacattctttttacccataacctctagcagccaccgatcttcttagcataatgtatttcagattcatccgtgttgttctgtatatcaatagtttgttcctctttattacagagtagtagtatatggatataccaatctatttatccggtcaccatttgagacatttaggttgtttccagtttggggcgataatgaattaagctgtgaaaaacactctcatataggtttttgtataaacataggctttcgtttcacttgggtaaatgaaattgccagactcgtttccaaagttgctgtaccattttgcaatgtttgagacttccagttgctacacattcatgccaacacttggttttgtcagttaaagaacaaaaatttaaccattctaatgtggactgattctgatgaagttcagtttatcagtttttttctcttttatggattgtgtttctggtgtatctaagaacctcttctaacacaaggtcacaaagactttcttctgaatatcctccatttcaaattaattttgtacaagcatatcattttttagccacaaaatattgacaaaaacaagttgtctctgtagcataggtttcaggtactttaccataagtgaacccctttgtagtacttcatctcatatgcaaaacattgcaaagaccctgctatttaaaatcgtgttttttaaaaaaataagattggccttattcacagaaacaacagtattcacaatacgctgaaagcagagacagaaaaagaacacctttgtcacctctaacccccacagtggagcccctttcttccagatacctatacatacaggacacataccagtccagggaaggtcctagtggcaatccatgtattgtaactgtttagcaaaacttattttttaaagataaaatgtataaaatgagctagtattttctccctgccctggagaaaagggttgtctgggggtttgtcttgcacaccttgctgggataccactgccctggtaagtctcacaatgttgcctgtctccctgtatttctaattgtgtctggcagagagtcagtgatctaggagtgagaaagaagtgaatgcattcttcaaagtctttctctgtcattaatggtgaagctctgttgcttcctgttactttcctgtctgctttcttctgggatttgtttcccagtagccaccttcttctaagctccgaacttgaaggtcttagcaaatgtttcttagaggatgacattccaaattacctgtaacttaggaccatggaataataagagaatataattttgaagctagaaggggatttgaaggtcagctagttcaaatctcttattaaaaccaaaccaaaaagaaatgaactataatatccatagaatagagtactactcagcaacaaaaagggaataaattgttgatatgttcaacatgaatgaatcctaaaagaattgtgctgagtgaaaaaagtcagacaaacacatatacactgtaaaagaaaatacatttcatttatttaaaaaattctagactggacgcagtgactcacatctgtaatcccagcactttgggaggccaaggcaggccgattgggtggattgcttgagctcaggagtttgagaccagcctgggcaacatggcaagattccgtctctacaaaaaatccaaaattagccaggcatggtggtgcgcccctgtagtcccagctactcaggaggttgaggcagaaggatcacttgagcccaggagatcaaggctgcagtgagccatgatcgtgcctttacactccagcctgggtgacagagcgagaccttgtctcaaaaaaagattccagaaaatacaaattatagtgacagaaagctgtaatcgcctatggatctataagtggtaagaggatgaggaggggaggattcagagggatatgaggagatgtttgggtgtcatgggtagtttaatctttattgtggtgatgttttcacaggtatatacagatatcaaaactcatccaatagtacacttcaaatatacaccgtttattatgtcacttatagttcaaaaaagttgtttatagaaaacaaaaaaaactagagacaatttagttgactcagaatatttaataaatgactactgtgtgccagatgcacattcttatgtgtttggcattcagagagagattgaagacatggcgcacaccttcagggagctcacagtctactgagggagtgagataaataaacagatgatttcaatccaggatgctagtgctaaggcaaaggaaaacaggccgggtgcggtggctcatgcctgtaatcccagcactttggaaagctgaggcaggcggattgtttaagcctaggagttcaagaccagcctgggcaacatggcaagaccctgtctctataaatttttttttttttaaatagctggttatggtggtatgcacctgtggtcccagttactctggaggctcaggcaggaggatcgcttgagcccagaaggtggaggctacagtgagtcatggtcacaccactgcactccagcctgggtgacagagtgggactctcttgggggaaaaaaaaaaggaaagaaagaaaaaggaaatgcagggaacatgaagagtctagaacatgagtatcattgggtgcctttttctggggagtttagggaaagcttaatgaaagaggggagctgagctgaggcttattgggtcaggtggaagagcctccccatcagagggaacttcatgggcaaagttagtgcaatgcaacttccaggaattgcctgtggtttggcctgactggagtgaaggacataatggggaggtagcaagagaagaggcaggagaggtggcatggccaggtcatgaagccctggagtggtgtttgtgctccaggattgaacagtgtggccaggtctagacctgtgtcgctgggacattgtcttatccaaacactcagcatggacttccaggttccaggttttgaggctttgacactcatagctgctcagttgtagcctggaagctgctatattccccagggatgtttcaagaccccaaaaaggagagaattggtttgggtctgggcaccagctggggaatatctgcctgccccttgcagatgcacctgggagtgaaggtgtctggtgtatttgaatgttggaggcaaccaacaatccagctgccccagaggcagtttttccacaagtaaagaagtttgttggctgggtgtggtggctcacacctgtaatcccagtactttgggaggccgaggcgggtggatcaccaaggtcaggagttgaagaccagtctggccaacatggtgaaaccctgtctctactaaaaatacaaaaattagccgggtgttgtggtgcacacctgtggtcccagctactcaggaggcggaggcaggacactcgcttgaactcaggagatggaggtgcagtgagccaagatcgcgcaactgcactctggtctggatgacagagcaagactccatctaaaaaaaaaaaaaaaaaaaaaaagaattttgtctttcacactggctggcagcactgatccctgacgtcctgcacatctgacaaaaatgattgtctcgcgtgctgatctgagtcctatctggtgctcacctaccctctggtcatctgttagccactcatctccttgtttgttggttggttttcagagcagactaagatactaaattcaggacactgttgttagaccacattaaaaatgcaggcggcagtgcagaacatggctggctcatgtcaggccgacttctcagtgtaaccagagaaggaaaacatggacagggcccgtgttaatggaagcagacgccagattgcatggcaggctctggctcctgtttctcctgttccctgccgccctccagccaaaagaaagaaactaatatgtaagctagaggttaaagtggaattgctgcttcatgagcatttctgtgatgcagagatcaagttgcttacatctcaaaagagctcctgtgctcccatttaggattgtaaactgtcatggcacttaggatcttctagaaggcatgacaagcgataagtgtgggttggatagttttttcttgggtcagggatttttttgctgcctttggtagagctggaccaagaggccaagcgaaggagcttgtggtggtttccatgcctgggccagcctgggaaagctgtggccagcacagatggctgaaatcaggtgggaccaggaaacgccaatgcggattaatgatctcaggtgaattaattacatcaggcaatgtcaggagggaagaagtttttaatgacatagtggttttgggtttttttcattttctcacctgggctagtgaaaacagtccggtgggccagatcgagctttgtggctctgttaattccgccctcttctccgcccccacaccatctgccagcgggaccgttaactggctcagtactcccttttgctgtgtcagtcctggaaggtcatgcttaactgtgattggggttggtttcccaaacagataggtgaaatggatgtctaactatcgatttgttttcttgcatttcagtcattccaaggaagtcaaggacgagcatacctctttaactcagtgtgagtgcctctgaatggtacattccttgtggggtacagattcgagggatgggaaaaagcaatccttggtgataattaaacaatgaaccctgccctgtctgccacagtaaaactctgtggagcattactgtccacaattggtagtcagttacctttggggaacatttcttgccaacatctctggctaaaaataatatattcactacattcccctcagagggcacaccagaggactgtagtcccacagggaagaagctgaggagattctgagagcctcaacctgaagggctcataatgagatctgagatttgtcactggggaagagaatatgggtgaaaaagacaccaagatctgctgcgggacctaaggaggaaggaaggcccacttcgggcagatgcacagtttccagggcactcagccatccccaggcaccaggtttatcacctcttccctgggaagggaaggtgaagcctacataagcctgataaactgtaaaaatgaaaatctggcctgtggcttgagctgggcaccctgtgaaggagtagagcctattcagcacccagggatcactcattcctgtatcaggaccacactgtgctatcatgtgtggcatcttcagcttcattcagtcctcagtaagctgtgaggacctgtgcccatggctgtggacttcacagtgtggctgtcagcttgtccccctaagtcacagatttaaagtatttgttagaaaaattaaaattttaagcaaactctcaaccataaagattatttcggtagacccactccactagaacttgcagatctgaatttccttccagctgagatatttccctgtggccaccttttggggattggtttagatctgctcagctcagggttggctccccttgggacagcctttcccagttaatttttgctggaagctcagcttgaatgcctgatgtgcgtgtcactaactacccactctctcttcttgtgcctcgacatagagttaatgtgggctgtgggcctgcagaagagcgagtgttgctaacaggactgcatgcagtcgcagacatttactgtgaaaactgcaaaaccactctgggctggaaatacgtaagtataaaggagtttggttggtagagggctggaagggaattgccaagagccttatgccagaacactttcttctactcgctttccatggccttgtgggattgtcttagaccagaatagtcacctgtctaccacactcattctttcctttctgctgatatatttccctcctcctattcattccttcacacctaccccctgagacacacacccctttagatttaataaataataatagtaatggcatataaccttactcgacagctcactagatgccaggcatgcatcagcagccttagaggttagatgctatcttcacctctattttatggatagggatactgagacttaaggaggttaatagtatgtccaaggcaatctagccattaaatagccacaccaggataggaatccatgtaatattctgttatttattttttatttctaaatttttcattctcaaaggacgtgaccatgtagtagtattctgacacagagcccatgctgttttttaaatattaggcaaatttattttattttattttattttgagacagagttttggtctgtcgcccaggctggagtacagtggcgcaatctcagctcaccacaacctctgtctcccagattcaagcgattctcatgcctcagcctcccaagtagctgggattacaggcacgcgtcaccatgcctggcttattttttgtatttttagtagagacaggatttcaccatgttggccgggctggtctcgaactcctgacctcaggtgatccacccccgtcaggctcccaaagtgctgggattacaggtgtgagccaccatgcctggccaacaaatttatttcttaataaatagagacagggtctcactgtgttgctcaggctggcctcaaactcctgagctcaagcagtcttcccaacttggcctcccaaagtgctgggattataggcgtgagccacactgttgcctggtccagaacccatgttctgaagccactgtactttgatactccaataaatgttcctaaaacacctaggtcccaggccctgagcaaggcattatcaaaaactgccttaattaacatccactgtcagatgtgatcatggctggacctctcccaaatggacaattattctttcattgtttaactcagcaaaaaatgttaaggtccctttggggcctggggaaagtgagcagtcctttgccagagtgagaggagggaagggctgggatctgctgcttgaacgctggggactaattgtcctaacatgcgctggggtcaccacataaccatagacactgcccctacagtccctctagctagtggttaagaaccatctaggcagctagagtcaggttcaaatttgggatccatgacttatttgtctgtgtgtccttggacaagctacttagcttctatgctaagtttcctcatacttacagagttggtttgagtgttaaataggatcatgcctataaaacacttaggtcatcaccttgcatagagcatatgtcagtgaaaattaacttaaattgttatttttattattagcagatttttttcagcctgcacgtgtacatccatgcattgcacattcctttctgttcttgccctccctgtcattgtgaggatactgaaaagttggtcttcctgtctctgggaaggcaatttagtccatgtaaaatgtctcaaattccctgtcctgtcatatggctcatgaactgcctctggcttctgaaggagcctgaaggagttgtcaaacctgccgcagagtgctgacgatatgtcagtgtaggttcatccattgtaacaaatgttctaatctggtgtgggattttgatagtgggggagtctggaggtgggtagcgggtatgtggaaaatctctgtactttctgctcaattttgctgtgaccctaatgctgctctaaaaataacatcttttgggaaaaaaatatatttacacacatataaaataatgtgagcagtacatgccaggcactgaattatgattccattgaaatagtttgaaaatgtggaaatcattaaaaaaaaaaattgtcccaggtggagcctggtagcactgcctttagattccattttccccatctccctggaaacattcaggattacaaacaaaaatggggccaggcgtaatagctcaggcctataaccccagcagtttgggaggccgaggtgggtggatcacctgaggtcaagagttcgagacccgcctggccaacatatagtgaaactccgtctctaccaaaaataaaaatattagctgggcatggtggcagatgcctgtaatcccagctactcaggaggcttaggcaggagaatcgcttgaacccaggaggcggaggttgcagtgagccgagatcatgccattgcactccagcctgggcgacagagtgagactctatctcaaaaaacaagcaaaaaaaaaaaacctagatagtgtgttgtgtggtgccaagatgggttagccacagcttcctatggttggcttggttgttcctgtgggagaagctggatttggccattctattccctctgtacagtcacgggccccctctgggtgatgatgggtgggggacacagttctaattgtggttatccagaaatgttcttcattgcttcttggccttttggctaagatcaagtgcagaaaagttctgcccctgcccctgtttcccagcctcttggctgtcttactgccctgaagatgtgttggattgaagatacatgataagcctgagttggttggttttgctccccacttgaggttcaggtaaaacaattcattcttttgacaaaggtttatcaaaagcctttgactaaataccaaaaaaatggataagatccagtgtctgtcctcaaagtgttgacagtcatgatgccagctgaggaggaaaaccaacatgaaaacagatcaaacagcctgacaagtactgtgatgtgcacagcacagcagggaaacacccaacaccccaaatatgcatccgtcacctcctatgtgccagctcagggcacgtttttttttttttttttttttgagatggagtctcactctgtcacccaggctggagtgcaatggtgtgatctcggcttactgcaacctccacctcctgggttcaagcaattctcctgcctcagcctccagagtagctgggattacaggtgtgcgccaccacgcccagctaattttttttctatttttagtagagacggggtttcaccatgttggtcaggctggtctcgaactcctcacctcgtgatctgcccgcctcagcctttcaaagtgctgggattacaggtgtgagccaccgtgcccggccctaaattttttgtattttcagtagagacacaggttcaccatttggtcaggctggtctccatctcctgacctcaggtgatccccccaccttggtctcccaaagtgctgggattacaggtgtgagccaccgcacctggccctcctttcattccattgttatctctgtgaagtaagtgtgaatctcccagttctgtaagtgatggttcaatgctgggaagcagtagaggcaggattagttggtgtgtttctgttgacaccaggtctagtgcactttccattggaatccaattctgacattttccaaatgcctctgtgtctcggggctattgatttattttatttattttttgagacaggcccctggctggactgcagtggtgcagtctggctcacagcagcctcaacctcctggacccagatgatcttcctgcctcagcctcatgagtagttaggaccacaggtgcatgacatcacacccagctgatttttgtatttttttttttttttgtagagatgaggtttttgtcatgtttcccaggctggtctcaaaccggcctcaagcagtcttcctgcctcagcctctcaaagggttaggattatgggtgtgagccaccacgcctggccgaattttttttttcataataggaaactcattttctttttttttatttttattttattttattttttatttttttattttatttatttatttattttttattgatcattcttgggtgtttctcgcagagggggatttggcagggtcataggacaatagtggagggaaggtcagcagataaacaagtgaacaaaggtctctggttttcctaggcagaggaccctgcggccttccgcagtgtttgtgtccctgggtacttgagattagggagtggtgatgactcttaacgagcatgctgccttcaagcatctgtttaacaaagcacatcttgcaccgcccttaatccatttaaccctgagtggacacagcacatgtttcagagagcacagggttgggggtaaggtcatagatcaacaggatcccaaggcagaagaatttttcttagtacagaacaaaatgaaaagtctcccatgtctacttctttctacacagacacagcagtcatccgatttcgcaatcttttccccacctttcccccttttctattccacaaaaccgccattgtcatcatggcccgttctcaatgagctgttgggtacaccttccagacggggtggtggccgggcagaggggcttctcacttcccagtaggggcggccgggcagaggagcccctcacctcccggacgcggcagctggccaggcggggggctgaccccccgacctccctcccggacggggcggctggccgggcggggggctgacccccacctccctcccagacagggtggctgccgggcggagacactcctcacttcccacacggggtggctgctgggcggagggtctcctcacttctcagatggggcggccgggcagagacggctcctcacttcccagacggggtcgcggccgggcagaggcgctcctcacatcccagacggggcggcggggcagaggcgctccccacatctcagacgatgggcggccgggcagagacgctcctcacttcctagatgggatggcggccgggaagaggcactcctcactttccagactgggcagccaggcagaggggctcctcacatcccagacgatgggcggccgggcagagacgctcctcacttcctagatgggatggtggctgggcagagacgctcctcactttccagactgggcagccaggcagaggggctcctcacatcccagacgatgggcggccaggcagagaggctcctcacttcccagacggggtggcggccgggcagaggctgcaatctcggcactttgggaggccaaggcaggcggctgggaggtggaggttgtagcgagccgagatcacgccactgcacttcagcctgggcaccattgagcactgagtgaaccagactccgtctgcaatcccggcacctcgggaggctgaggctggcggatcactcgcggttaggagctggagaccagcccggccaacacagcgaaaccccgtctccaccaaataaatacgaaaaccagtcaggcgtggcggcacgcgcctgcaatcgcaggcactcagcaggctgaggcaggagaatcaggcagggaggttgcagtgagtcgagatggcatcagtacagtccagcttcggctcggcatcagagggagaccgtggggagagggagagggagagggacaggaaactcattttcttagttttgctttttcctccttcccccccaaacacattaccgtggaacaatggaccttattcccaaaacacattgctctgtcatgtgtatacacgcatgtgtgcatgtgtgtgcacagagacggaataatgaagtgtcagggacattgctgctctggtgtgcctgagctcttgttctgaaacacaaagcccctgagctctagaacagaagacacagttgatacaacggtgacccagaaccccgcaagggtacgcctcaattccttactaattctgggggctcagggaagggctgatgtccactgcttgtgcatatggagctgagacacagatgaccagtgtttttcagagaatacaccaagatgttcttatgtgtgtatctctgcaaacaaaagagccctgtttattcgctgggagagcccacagtgctgtgggtttagaaaagtcacctgccaggtggttagtatgacgttctccctctgggggcctggcagttaggtggggcttaaggactgccaggttctctggcctggagtttatacagctcctgtctccacacatctgacatagaagcagcaagaaaaaccgattgagaaggagacctgtctggcctcacggtattttgttcctctccctgtcttctctaagcctaacaattacagtttaaaattagaaccaggcgtccgggcgcggtggctcacacctgtaatcccagcactttgggaggcctaggcgggtggatcacgaggtcaggagattgagaccatcctggctaacatggtgaaaccccgtctctactgaaaatacaaaaaaaatttagctgggcatggtggcaggctcctgtagtcccagctactcgggaggctgaggagggagaatggcttgaacccgggagacggagcttgtagtgagccgagattgcaccactgcactccagcctgggcgactgagcaagactccgtctcaaaataataataaataaaattagaaccaggttttcttatgttcttagaaactagcaggaatgacacagaaactttatggatctaacccagggcaaacttccgttagcaccagtaaaccaagatttatatatatgtaaatttatatatgtaaatgtactaattcattcagcaattatgtattgaaattctgttatgtgccaggcagtcttctaaggctacagccatgagctaaacatgaaagtctctgcactccatgaagtttatattgtagtcatgggagacagagcataaacaaaatagaaatgcaaattataatgtatattcagaagtgagaagtacagtgaagaaaactaaagcaggggttggggcagaagggagaaagggagtactggagtggaagttggattttaagtagggtagctggggaagaccttactgagggggtgacattgcaaagacttaaatgagcgaagctcctggaaaattgtgttgtaatattgtgaaagtcctggtgttgcctcagttctgcagctaagcgagggggacataaagcgcttgaggggtaggaatcatctcgctgagtcaaggtgaagctgggaccagaccgtggtgacgctgatacctgtcatctgcccctgcttctctgctacaaaaggcatttccttggccgggtatggtggctcacacctgtaatcccagcaggcatgagggaggccaaggtgagtggatcacctgagctccggagttagagaccagcctgtccaacatggtgaaaccccatctttactaaaaatacaaaaattagccaggtgtggtggtgggtgcctgtaatcccagctacttgggaggctgaggcaggagaatcgctcgaacctgggaggcggagattgcagtgagtggagattgcgtcattgcactccagcctgggtgacagagtgagactgcctcaaaaaagaaaaaaaaaatcattttcttgtctttggtcgttcagtatctcttctctgcttctgtatttcctaggaacatgcttttgaaagcagccagaaatataaagaaggcaaatacatcattgaactagcacacatgatcaaggacaatggctgggactgattggacagcatctacccaacccagtgtccacgtgaacgccattcaaccgaacattcttcccaagcgtgagagagtgactgacacttggttccatccatttaggggccttgccatccggggcatcctcccaccctgacgccatctttctggtgaccggcctctaaatcgctgtctctctgtctctttgctttgtatctgtttgtgagttgatcctggcttctctctctgttctagttttggctgaaaacaaaacaacaaaaggaacagatccttgaccgcatggcggcagcccaccttggtaagggccccagggcccatgcgagagctgcctgatggcctcttgtcaggagagcagtggcacgggggcgtgaggaagagggaaaggggaaactctaagggtcctggcgcggggaaggggtggaagggtggaggtaggaacaaaattgcgccgctcctggagacctgataacttaggcttgaaataattgacttgtctaaaaggacaaagagaaaaaaaaaatacctcatgactgcattctctctgactagaagcttctgttcctgacaccaaatgtgccaggttagcaaatgagcacaagatgtggccctgattctagttggtggggcaagggcctggttctcctgggctgagtgggggagtgtcctggcagcagcgagtgacctgggcagtggccaggtgggtgcgatgactctgatgcctcactcagtctctgggcaatcatcatctttgcctctagccaccgtagataaggtgtgaagggactgctgtttgcaatgggcttaccatccaaatatcccaaaggctttgaccagcaaccaagtaaaatcagtaattgaggagagcagggcacaaaggggctgcagtttgggagctcctgaagaaatggctcagatattgagtcagagaaataaaaagtaggatcagttagcaattctaactgcccttccttctgacccctcataagaggagtgtggtgagggaggggactgggtaggggtcatcccaggaggaggggtttacattggaaccagttcaggttcggtgcatctttcctcttcggttttacagtggcttccgtgggatcgtcaatttcttgttcttagagtttcgggtgtttttctccagtcttgttactgtagactgtagaaagcacgggccccaggctctgagcttagtaataacctggctggtagattcctcatgcccctaattgtcccacttaggcctgaatgtcttgcatggagagaaatctcctgtcagtgtggtccagcagcagggaggagttctgcccaaattccgatatcaccccttcccccatccaagcatccttcgattagggaagtggagagcacatccctgtaaggcccataagagaaagaggagtttgttacatttaatcaacactgtgaagtctgttctacagcaattcagccattacacagtatatgactgaaactcatttaactgggttaatttcatttcttagactgaatatattattgttaagatacgtgtgcgtgttaggtaattctcagcatctcctccaagtaggccgaccttctcggaaaattcaccctaaaagtctcacaaaagaatgagttcatggggagattctgtaaagtgatgaactgagatgaaagcagccaacagcccaggagcttttcagaatagcgtctgcagcagaaccagtttccattcagagcgcgtccttggtggaaatgcttttttgtgtgtctccacgcgctgatggtggaatgggagccccaagacgtgtgggcttagaaatcaacttttgttccccaaggcttcttgtccagatctttccagtgctttcatagccctgggagatcaagttgttctccccactttactgcaaggtagactgaagttcagaagaaatactgaatttctgctcccagaagaatagtttctctggctcacaggcccaagttctcaatgaaatcgttttttaactttcacattcctaagctggcttcccggcacagaagccatggatttcccctctctcccttccccctcctcaaggaaatagtcttcctttatggattttcattggactctttcctcagcgattgtcctggctgtttattgatagtccttcccataagaaaatggggttaaacatggggtaggtattttgtctttcaaactacaaatggaatgtggtgacataaactagacatggggtgccctcaagtttccaaggggaccaatgtgccactgttcttccttggggatgaggcctttgactgttggatggatcagagcaggctccagtcagaccctggttctgaatgttttttttttcggtgactatccagtgagccttcagtgggtgcaaggcgccatacttgctgtgagagagctgagtagagtgttggtttttccataactacagggggaaaaaaagtcattaggctttccctttgtgtcagtgaaaccaaaagtgcttcttacaacgttcgctctgttcatgggttgtctatctaacattgagcagcattggagaggccacagctgagctatggagatgctaaattaactcatggcctcagtcagttcattctttaatttcctcaccaaattattgacttagagcataaccaaagacctcattcattcaccccaggtgggttggggtaattggagtttgttggtgaagtttgggggcggggtgttgggagtagagacagggtaaggggacgtgagaaaggaaaaggcatgaagttctatacctcagccagcagctgccttcgtttggaactgaagtccagccagcagactctctagctccatctcccctgtgccaccctaggtcatatgaccttggccaccttggagtagacccagacccctcgggacccgggacattagtctcaggctgctgatggattgatttgacatgaaccaaacacagccaaactcgatacccacaagctgtcagctgaacctgactgagtgttcttcctgagttcacgaggataggctagagtgcatttttactggtggatcagtgtgtgcgaaagagatgaccctttataaagagattttcaagtggatatatataaaagaaacagttgcttgtaaaatatacttttgtaaataatatttaattttttaaataatatatttggtgctgttttctcagatcccctgagagcactttttattttccttttaaattctatggtttcctttgcatttcttgaagtatattttaagggaaacagtgatcaccaatacatgttttcagttttttttttttttaaggtctctatcactttaatctggatcaaggctttgaagcaatgcctctctgcattttttccccagtggaacagactctgcagtacattaatcaggttgagaattgaaatattttcttgcatcagtattggctagaaaagaaaataaataaaaccaagttaatttagtagtaacaacttacagtgattcttcctgttggaagaatttccaacaaatcagaatcacgtttttagttgtgcgtgtgcgcgcacacgtgtgtaaaaagcactttcgattgtgcctcctgttttctcgagtggggacactttaactacagtttacacctcgggcgcataaagtttttcttctctttctctctggttgtttctgtttctgagtggaccaacagcagaacccacgaggatttgttttgagtatggagctgttgcgggtttgctcctttttcttgctttgcgtgctcagtttttacagactgtaaaggagatgtgttgtttgtgaagatggagcagagtcaaatctgtgcttctaactgagatgagagtgtattaatcacgtatcgcagggctccagctgttttagaagccacatcatgttaaacattaactggtttggattaaaagaacattaatattataatacacatatcttagtggtaaacagctttttttttttaaggtcagattgcctcaggtttagaaagaggctgagaaatcaaatcttgaacacaatcaacttacatattttaaaggaatctgcctcaaatgagaaaatatgctagttatctagatagaggaaagagatatttacttttttaaaaattaaaatagttatgaaatctggcagaaaaggtaaagcctagaagaaactatgaaagctattctcatgttaccaaattctatctgcgcatatgtttttgtataacatttcggtgacagtgggagtcggttccctttcccaacctgcagagactatcttccaatacagaatctgtctatttatgcttgtgtttacaaactgtatttgttgggtttgggtttttgttttctttggtggcatttttcaggtcactttgcttctataacaaaggtaattgttttcaaataatttgtcttcaccttttcctgtatttgtacatagtgattcagtattagagaaaagtgcattgtttctgtcatatttccaatctgtgttggtgctcatttgagaaaataaaagttttcaaatattaactctttgaagagctcatctgtcttcgttgacccagtgtgtttgatcttgacatttcatattaaagtatttaaaggcctatctaaatccagtcacagatctgttgactgagaccctaagggcttgtttttcccaaggacagtcagctaactaatgaataacagcaggtctcctgcttatctgcaaatgcttctcctggctttagatatcagaaatgcatgagtgacctttatccagttctgtgtacaaagccccatattcatagactctgcagacttttctgatgacaccaatttctttggaaatagtattgcatgaagtaaagggaaaaaaagaagtaaaacaacaaaattatgtcaaaaaggggtggtatcatctctgaatgattggctaatagagaccagcattcacagttataacatggcatatcagatgttctcatttttattttatttttattatcaacacatttattaaacatgtgtttgattccaggcactgggcaaggcagttctatcatcctaataaataagctgtttttgtttgccaagtacttttcatctggtctgatccatatgcacacactgtcttgtatatccagtcattgtaagtaaattttgtgagctggtgccttcatttaacataagctaaacagttttgtctcggcatcatcattattttattttttatttttattttattttattttattttatttttgagacagagtctcactctgttgcccagactggagtgcagtggcaccatctcggctcactgcaacctctgcctcttgggttcaagtgattctcctgactca[133 bp omitted]cgtcctcccaaagtgctgggattacaggtgtgagccaccgtgcccagtttatcattttatactatatcttaaagtaccttttcaaaagcttgcttccatatcttatggagtacccatcttgtacaggcagccaaaatggcaaagaagatactaaaaccacacaagtgtgcatgtttcacattgctaatatttttaaagcctttctatggccaggcactgtggcttatgctcataatcccagcactttgggaggctaaggcagaagggtggcttgagtccaggagtttacaaccagccggggcaacatagtgagaccctatctgtataaaaaaattagccaggcatggtggtgcatgcctgcagtccagcttcttgggaggctgcgctgggaggattgcttgagcccagaaagttgaggctgcagtgggtcgcgattgtgccaccagactccagcctgggtgacagaatgagaccctgtcttaaaaaaaacaaaaaaaatctgttttatgaaaaaggacatgccttctctccttcccacacattttcacctacccattctgggcccagctacacttgacttttatttgtccttcagtatattatcttcttccagtgacctgttttgcttcagtggatgtgcctgttatcatttcattcttgtttgccttttgcagagaaggacgagagaaaaagaatatgcatgagacaaccaatgtcaagccatccttgggtcctcattctttcaagctcttgtttccctgctgggagaaagggaggggagaggacactatccccattttgtagataatgaaattgaggttttgcaaggtctcattactaaaccatattccaattttagccttgttaagtctttttttttccttcgaggtagggtccggctctgtcacccagggcggagtgcagtggtgcaatctctgttaaccgcagcctccacctcctgggctcaagtgatcttcctgcctcagcctccaaagtagctgggaccacaggtgcacaccaccacacccagctaatttttgtatttttttgtagagctggggtttcggcatgttgccatgttaattctggtgctgcttcacatgacactttcccagtctgcccaccctgactgcttaataagagctcagggaatgcaaattagaaaattaagataaaacagctacagaagtcaatgctacctggaaagtattatgtatttcatagctcaatatttttacactgggctttgttgttgtttttcagtactctctaatggattacatatgtaatccttggccatctacattaataataggtgctgaataaatgcttgatgggccttgaattggatggtggagaattaacagcttttaaaaaaatctgttcaatcatgtcagtatgtttaagaggagaatggagaagttaagcataaaatgcttcccacatagggaaatggttcggtttatttgcatttatttatcctacaagcattttttttggacatctattatatgcctagtctagtagggaaaccaatccaagggagcagaaagctgtggtactaattttgcagtgtgagaggatgagggattattatgcaaggtcctccccactttgggccaaatggctcgccacatcagccaggaccctcacacaggaccactggaccctcacaggcacctactttctgctgaagcaattgctcataaagcctttcatctgaaaccagtaagtggctcgtgtcctagagcggggcatggggtaggctctggagctagagcaactgagctcaaatactgatttcccttagataatctgtagaaaaggctcagcccagtgcctggcacaaagttaaggagtcaagaagatgattgttatcacgcatggcacaagtctattttgaattgagagtgggatgaagaatattatatttgctctttatgcacattatttgtttagttcacacaataatccccccatttcacagaagaagaaactgaggttcaagaagtataaatagcctgcctgtggaaaagcgaggattttcactcttgttctgattctgtgaagcccacaccctatctgtggccccagcctgccatgaaaatcaaccagaaagaaacttcctggcagatctgagcgtacaccaaaatgtcatggctattttgttcactcatgttttattctttttacatataaaatggaaatcctggcctttcaagcattggagaaacagagcttagaactgtgggatggttgggttgtattatacttttattttacaggagttcagcctttttgattgtggcactatgcttttatatttcttttctttttttttttttggaggcagggtctctcactctggttgcccaggcaggagtgcagtggcacgatcaaggctcactgcagcttccacctcccggtctctcgaactcctggcctcaagtgagccaccctcctcagcctcccaaagtgctgggattacaggcatgcaccgccatgcccagccttatatttcttttgaggggaaaaaatgttgttttcatttgctcaaaatgattttaaaagataaaaaaaatccagacccttgcccacatgaaaatgactaaggtattctaacacatgacaacatctttatggagccattcagaggtaattctccagggtagcttggaacaagccaaggattgaaaaagttcatgttgcatataaggtacctgtaattcccaatgataaagaattttatatatatatatatatatatatatatatattttttttttttttttttttttttttttttgagactgagttttgctcttgttgcccaggctggatgcaatggtgcgatctcgggtcaccgcaacctccacctcctgggttcatgcagttctcgtgccttagcctcccaagtagctggcatgtgccaccacacctggctaattttgtatttttagtagcgatagggtttctcc[141 bp omitted]cccgagctcatgagctcagaaatcaacagagtcaagtggaaagaaccttggctttggggttggacagatggatttgaagcctggctgcatgtttacacatttatcactttgagaaagtcactgcaattatgaggtctcgtttccatcatctgtaaatagggaacaccagcaaccatgtaagttatcgtgaggtcaaatataatgacagccataaagtgcccagcacaaatgggtctccgcaagtgtcacttgtctttttactgattgattggaactcactgtggtgaacactgtgagcacataggatatgtaggattcagcactcatccctctgagcccacctctacacaggggactgacacccagagaagtgaagtaatcgtggttactgggcctaataagcagcagccctgttaggcaatgaagctagtggtccttgcaccatactgcttgcttttacttctagaggagagtgtacgtttatggaaagaagaaaggtagggggacatcagctagaaaaatcatccttgaattttacgctaatcctctctggtggtcttcagtacagcaaaatgcactcatcatccctgcactctggtctggcatgcaggtaacgtgctggagaggaggaggcccaatgctgtcaaattcactcacctccccagcttcccctggacgtgtctgcctcaaattctgagccacttcgccagagcaaggccacgcaagcaaagcaaccaagcagtcgaatcggggatgttttatttatggctttaataatgaagcctcttggggaaattttagtttcccattcccagaagcgaaaatgcgtctacagaatgttcttaaaatttattactgtttatgttttttcctaccacagtctttgcaccaccttaatagagtttaaaacatcccttcccaaagtagacaggatgatctgtgctgtcattcatttggctggttcttgaccaagccagcacacttaaaaattgaaaatacaggttgataatgctgctgctgatgacctaatcctatgttgaacctgttgtggttattattaaaactgctgctaattcaacaggaccttgttttggcactgcccagttctcagtcatttatttccagggcagctggaagaactgcacccatatctcttggaggcactcaggcttgaagctgtttccatggagacgagacatacccaaggttcagatttcatttcgttttagatctcaatgatattagaaaagaaatagtttactggcgagaattctcagccatctgagagaggaggctggagggaaaagagagccgctgacctcctggagcccttgctgtaggagggaccgctttgggagtttttgtttaacaagggagagtgggtagtcatcctgcaaagaaaaggtcagcgttctctcagaagtaactggcatggactttctgagtccagtgcatcagacatttcctcttgccttgggtaaacccaggtttagcctgagggaggcttgcttgaaaaagcaagcagtgggacgaggcagacagaactcaacataagaatgcctgttgttgtttttttttttttttggagacagtctcactgtgtcatccaggctggggtgcagtggcacgatctcagctcactgcaacctctgcctcctgggttcaagcgattctcctgcctcagcctcctaagtagctgggattacagatgtgtgccaccatgcccagctaatttttgcatttttagtagagatggggtttcaccatgttggccaggctggtctcgaactcccgacatcacccacctgcctcagcctcctatggtgctgggattacaggcttgagccaccacgcctggtggagaatgcctgcaaaagacttttctaccagtgggcatgagacgcacaggcatgtggtttaaaactcgggcaccagagtcagacctggttctgttgctagttagatgtgtgaccatggatagatcagttaccttccttttttttttttaagagatagggttttggtctgtcacccaggccactggagtgcagtggcattgtcataactcattgcagcctcaatctcctgggctcaagctattcatctcggcctcccaagtagctgggactacaggcctgcaccaccacacccggctaatttttgtatttttatttttgtagagatagagtctcactatgttgcccaggcctcaaatgatcctcccacattggtctcccaaagtactggggttaaaggcgtgagccaccacacctggccagatcagttaccttctgagactcagttgacccatctataaaaaggggttacaggccgggcacagtggctcatgcctgtaatcccagcactttgggaggccaaggtgagtggattgtttgagcccaggagtttgagaccggcctgggcaacatagtgagaccctgtctctacaaaaaaattaaaaaattagccaggcatggtggtgtacacctgtagttccagctacttggggggctgaggtgggaggactgcttgagcctgggaggttaaggctgcagtgagctatgattgtgccactgcactccagcctgggcaagagagcaagaccttatttcaaaaaaaaaaagagttactgtgaggactaagtgagatcatgcacatagagaaagcctggcactgtatagctgaagaaatggtcatgatttttgcttcagtagtgtgagggcaaggcatggatttatgttactcaaagtagaaaatgcatgtgaaagccgggcatagtggctcatgcctgtaatcctagtactttgggaggctgagacgggtggatcacctgaggtcaatttttttgtagagacagggtctcactatgttgcccaggctggtctcaaactcctgggctcaaacagtccactcaccttggcctcccaaagtgctgggattacaggcatgagccactgtgcccggcctgtaacccctttttatagatgggtcaactgagtctcacaaggtacgagaccatcctggccaacatgatgaaaccgtgtctctactaaaaatacaaaaaaattagctgggcatggtggcgtatgcctgtaatcccagctacttgggaggctgaggcaggagaatcgctggaacctgggaggcagaggttgcagtgagccaagattgcaccactacactccagcctcggcgacagagcaagactccatctcaaaaaaaaaaaaaaaaaaaaaagaaaaaaagaaaatgtatgtgaaacactgcacagaggagagggattcttaatatcatggatgataatgatcccttttttctcatgtactttttttttttaacttttaggttcaggagtacatgtgaaggtttgttacataggcaaactcatgttacaagggtttgttatatagattatttcaccacccaggaattaagcccagtacccaatagttgtcttttctgctccgctccccgctcccatcctccaccctcaagtataccccagtgtctgtttccttctttgtgttctaagttctcatcatttagctcccagcatgttctttctaaacatgttttattttatatttctttccagggaatttggcaaatgctaaatatccccaaagacaatcactcacacattctttcaacaaatatttatgagctaggctttatgctagggataaacagacaaggtctctgcccttagggagttttctcagtccccctgggaatgcttatgcaaaaaggggagtgggtagttgcccagtgaaggaaagatctgtgttgccacagcagttactggttggactagaaagtaaagttctagaaaggcttcccatgggccttgccaccatggcccctcttccactgggtccctgcagcacttggcccaggcctctggtatggtccttatcgagttgtattatctgtgtccctccctagcccttctttgagggcagggacccagactcttttctttttagagacagcgtcttgttctgttgcccagcctggaatgcagtggcatgttcacagctcactgtggccttgacctcctgggctcaagtgatcctcccacctcagcctcccagtgggattacaggcgtgagccactgtgcccagcccagactctttctttacagctacccagactaaaggttcaatgaagggttgctgaaggaataatcaagtggatatacagatgctcaaagaattcttcctttcaactctaacccaaaaggaaactcatgatatttattgaacatatgcgggagaaaggaaagattactttagcttttaccttattccactggaaactctaaggtaaatgagagagaagcttagaggacgggaaacctaagtaaagcatgtagacagatgttttctacaaccagtgttgggggggcaaggaaggtcctcaaatggttccattcagtccaacttaagtacaagtggtgggaagaatggggtgattagcagttactcatggagtagcaaagcggcagatttctccacatgggctatgttggagaggatgctgagcaaagtcttgggagcacaaacaggaatcccttcagggggctggtcagagggcggtgtgctctctgttgcccaaaggaagttctcacaagtagagcctggatgcaagcaatgtatgagcccacgaagtcagaggctgcacagtcagtgagcatggactgcaaaactttcagcggggtccctttaggaccagcctcttcatctccaggccccactaatctctcttattccttgttctttgctctagggaatctctttcctttcctttcaagtgagagatggaggtgggaaaatatggctttcttttatggtgttttctcccaaatactttgcccttactgagaatcttctttttttttctttttttttttcttacccttgatggcctaggattatgaaactcaagagccagagagatagatacacatatttttttcaaatcagatataatttacaaacagtaaaattcacctttgaaaaaaaggtgggtgccgtgggtcacacctgtaattccagcactttgggaggccaaggtgaaaggattgctggggccgggagtttgagaccagcttgggcaacgtaacaagaccctgtctctacaaaaataattttaaaaatcagctgggtgtggtagctcacacgtgtagtcctagctactggggaggctgaggctggaggatcacttgagtccaggagttccaggctgtgtaccactgcactccagcctgggtgatggagtgagacccagtctctaaataaatacataattataaaggtgtacagttttacaagttctgacaaatgtacacagtcatgtatacctgtcatgcaccacagtcaagatacagaatattttcatcacctcaaaaaattccacatgtcccctttgtaatcacctctctcctccagccccagcccctgacaatcctgttttctgttcctatagtttgcctttttcagaatgccatacaaagcgttttgagtctggcttctttcacttagcataatgctttagagattcaaccataatgtcgtggttcattatggtcgtggatcaataggttgttcctttcattgctgaatagtattccattgtacggatatgccatcatatgttcaccagttgagggacatttgttttgtttccagtttctggctattctgaaaaacctgctataaacatttgtgtacagatttttatggatattgtgcctccattttcatttctcttgggtaaatttctaggagtggagttgctgg[131 bp omitted]gccaacatggtgaaacctcgtctctactaaaaatacaaaaattagccaggcatgatgatgtatgcctgtattcccagctatgaaggaagctgaggcatgagaattgcctgaacctgggaggctgaggttgcagtgagccgagattgcaccactgcactccagcctgggcaacagagtaagcctttgcctcaaaaaaaaaacaaaacaaaacacaaaacgattgcatatttaaaagaagacctcacccctgaccca[138 bp omitted]tggtgaaaccccatctctactaaaaatacaaaaattagctgggcatggcggtgtgcacctgtaatcccagctacatgggaggctgaggcaggagaattgcttgaacctgggggacagaggctgcagtgagccgagatcatgccactgcactcca[135 bp omitted]ggcgtggtggcacatgcctgtaatcccagctactctggaggctgaggcaggagaattgcgtgaacctgggaggtggaggtttcggtgagccgagatcttgccattgcactccagcctgagcaacaagagcaaaactccatctcaaaaaaaaaaaaagtcatttgacatgaagagtcatttaatccttttgaggagtcattttgttactttaaatcatgtcactcctcacttcattagcatacaaatttgctgtttatttatctgtctgttttgagatggggtctcactctgtcacccagactggaatgcagtggcacgattttggctcattgcagcctccgcctccctggcttaagcaattcttccacctcagcctcctgagtagctgaaaccacagatgtgcaccaccacacctggctaattttctgtatttttggtagagacgcggtttcgccatgttacccaggctggacttgaacttttgagctcaagccatccacctatcttggcctcccaaagtgctgggattacagatgtgagccaccatgtctggccaatctcccaatttataatctgggctatttagttcaaggctccagtgagactattatgacctctcaaagaggctgctgaaccagcatctagaaaactcaagcctgaatggagactacaacctcctccttctgcctgagtattgaaagaaaggcatttcttccagctgtgtatgggactgtcacaatggggtctccgtctacccagagttgctttcttacacaccctgtgtagccaacggaaggagcaaaacatccggcagcttactctgagggtctgtgcgtcccacttcctttcctccaaggggaaattgctgcaacaatcaccagtcacctctgtttgaccaaatttgagaaagagcgaggggcagcagggaatagactggtgggacttttgaagaattcaggtaatctgctgactggtgggtaatgcttacttttcgtttctaggcaataaataatgacttacaagcaaaaggctactccctagtttcagacaccatctggatccatttcccccaaggcctagtatacagtgtgacccagtacgatggcaaatgtaaagcctgctgaaatcgagtgcccatgtttgagaaccagactccagacatttggttcaaaaagtgatggtgacacaatggggtcaagtgaagctgtcaggaaaatagctgctaataatagctcatttgtattgagcactcactctgtgccagacaccaaatgttccatatgtactttttggtttttttggagacagagttttgctctgtcacctaggctggagtgcagtggtgtgattctggctcactgcaacctctgcctcccagattcaagcaattcttatgcctcagcctcccaagtagctgggactacaggcacacgccaccatgcctggctagtttttgtatttttgtagagactggttttcaccacgttgcccagactggtctccaactcctgagctcaggcaatctgcccgcctcagcctcccaaagtgctaagattacaggcactcttagagaatgagccactgcacccagcctacatgtactttttcattagccttcacattaaccctctaaggtaggtcctattattaactcagttttacaataaataaaacagaggctgagatggtgacttcttttttttcttttttttttttcaagagatagggtcttgctctgttgcccaggctggattgcagtggtgcaatcatagctcactgcagccttgaactcctgggctcaagaaatcctcctgcttcagcttcttaaagcactgggattacagatgtgaaccaccatggccagcctggagtctatattttaaccaccagatattcagcctccaacccaagccccactatagcaaaaatccccagggaaataagtccaacaaagggaaaatgtgaggacaaagtgtttccaagatttcagaatctacttcgaagatcaattcattttaagaagccatttatttattcatttaacaaatattaggctgggcacagtggctcacgtttgtaatcccagcactttgggaggctgaggcgggtggatcatctgagatcaggagttcgagaccagcctgcacaacatgacaaaaccctgtctttactaaaaatacaaaaattagccgggcgtggtggcgggcacctgtaatcccacctacttgggaggctgaggcaggagaatcgtttgaacccgggaggcggaggttgcggtgagctgagatcacgccactgcactccagcctgggcaccaagggcaaaaccctgtgtcaaaaaaagaaaaaaataaataacaaaaagccaaatatttatgaacatgtacagatgctgaggatacaacagtcacaacataactatggttcctgccctcacagaccttatattctctaagacggacagtttgtaaagagaaaattacaataaaaaataatttgcttcatcagagggctgaaggggtggtgtcagaggaataggtgcctatatctgattatgagtgtgaggaagagcttcccagggggcatcttcagagctgagtctcaaagaatttgtgggaatcaccaaatggatatgctgtgtgtgtgtgtatgtgtgtgtaacacgtgtgtgtgcatatgcacaggggttgcacagaagagaaaaggaagaggcattgtgggcagaggggacatctggcccagtcctcagacctgagacttcaagtgcatctggtatgcctggaacacagagttcaagggaaacagcagaagagaggatcaggccacacagggaggttggcgccaggtcttgaagggccttgtaaggtgtttaggttttaactcataggcatcaagaagtcattaaagaatttcaagcttgtttccttacttacggggtggggggaaaggattttcgagcggaagcatgacgttgtcagatacacatcacatttccacttggacagttatggaaggaaggactacagagaggcacagaggctggatggaggcgagaggtgattgaggaggatgtagcaataatgcaggtgagaaaaagtgaaatgcctaaccaagggcagtgcccctggggacagagaggaagaaacagataaggaaggcagagccatgggagtcaagggctgtttcaccacgaggtagtagcttggttacctcacaggctatggctccacccaacacttcctagcagcgaacttgatcatgttgcttaactttaagtctctccattagtaaaatggtgataataatggcacctacagcacagggttgtggcaaaaatcaaatgagatccgtgtgcttagcacagtgtctgacaccggaagtgctcagctacttttctgtttttatcctttagtgagaggaagggagggctgtagcctgggtcccaagttcctggcctgggtcatcgcgtggatgtgcactaggttgagggcagactcctggagaaggctgcagtactaagaacattgtgagctgatcctcatgggccacgactaagatttgttgtactttttagctatggaagtaacgaatgatgcttctgaatagctccagcttctctagaggaggaggaagacatggaataagtaatctctcccaacaatcccatctaatttaagcatcaccatcctcccagtttactaggttcaaaatccaggagtcagctttgattcctctctgtcaatacgcctcacccatatctaacccctaggcaagtcctgttagctctgcccccaaaagaggtctcaaatctgacgggttttcatcatctccaatgctacaatctgattcaagccaccatgtcttgcctgaactccggcaataacctccttatctggtctcttcacttccacttatgccccttatagtacatttccaagaatagccacagtgagcttttcaaggtataaagcagaccttgctgctcctctgcaatcagaatgaaactcagaatcttcaaggtcctacatattctgtctgtcactcgcagcctcgtgaccacaagcacctggacattctttctgtgccttgaacacatcaagcttgtttctgctcagggactttgtactgaggtctccttgttgggaacaagccccccaaaatctggccataaactggcccccaaattgcccataaacagaatctctgcagcactgtgacatgttcatgatggccacaatgcccacgctggaaggttgtgggtttaccggaatgagggcaaggaacatcgggcctgcccagggcggaaaaccgcttaaaggcattcttaagccacaagcaatagcatgagcgatctgtgccttaaggacatgctcctgctgcaggtaactagcccaacctattcctttattctggcccatcccttcgtttcccataagggatacttttagttaatcgaatatctatagaaacaatgctaatgactggcttgctgttaatgaatacgtgggtaaatctctgttggggctctcagctctgaaggctgtgagaccgctgatttcccacttcacacctctatatttctgtgtgtgtgtctttaattcctctagcgcagctgggttagggtctccctgaccgagctgatctcggcactcctcgcttaggatggtttttccttgggttctctcatacctggctctttcttacccaccaggtctctgctcaaatgttggccctttctagccccacctcaccccttcctcctccagtcactctttatctattaccttgttttattttcttcatatcacttatcaccatttccttcctttcttcctttttttttttttttttcagacagggtctcactcttttacccaggctagagtgccgtggtacaatcctggctcactgcagcctcaacctcctgggctcaggtgatcctcccatctcagcctccctagtacctgggactacaggtgtgcaccacctcactcggctaatttttgtatttcttatagagacaggttctcatctatgttgcccagcctggtctcgagtgtctacacttaagtgatctgcccacctcggccttcgaaagttctgggattacaggaatgagccactgcacccagccctttcctttttctttctcttcgtctcttttttttcttactttatctctacgtgtaagtggtttccacaaggaataagaccttgtctcgttgcctgtatatcccacatgccttgaatagtacgtggtacatagtaggtgctccataaatacgtttttttgtttttcgttttgtttgttcgtttgttttgagatggagttttgctcttgttgcccaggcaggagtgcaatggcaagatctcggctcactgcaacctccacctcccaggttcaagtgattctcctgcctcagcctcccgagtagctgggattacaggcatgtgccagcacgcccagctaattttgtatttttagtagagatggggtttctccaggttggtcaggctggtcttgaattcccgacctcaggtgatctgcccacctcggcctcccaaagtgctaggattacaggagtgagccaccgcgcctggccataaatatgtttttgaattgataattaaatgactgagtgaagtaattacaataaagcatattatcacgcagtacagccatggcagcatttgagatggctgttcaactgtgtattggaaatatttccatctgtctgagatttactttttatttcattttaagttctggaaatatgcttacccatatctgagatttaaattcaatcctgcctgatagtaaaaacttggactagacttttctcagaattcttagcaatctgggattctgggagccatgccttttcccaggtcccaaagtgttctccttt[139 bp omitted]ttggtgaaacccccatctctactaaaaatacaaaattagccaggcgtggtggcgtacgcctatagtcccagctactcgggaggctgaggcagcagaattgcttgaacccaggaggcggaggctgcagtgagccgagatcgcaccactgcactccagcctgggcgacagagtgagactccgtctcaaaaaaattaaaaaataaaaaataaaaagctcctgtggccaaatggttgctgaaatggaaacctggccaccattcttaatggagcaatcagtcaccttcataaaaggcactgccaaaattctactcagattgttttatagttgatgtcataacaaagactcccattcgtggagtacatatgacttccatccatcttgcatgcctcctagctaattgctgtgccaactctgcgggagtagatgttatcctcctcctaatcttgcatgtaaggaacctgaggcccagagaagccctgtgacttgcctaaggtcacaaagctgataaagaaggagctaggattcatcccaggtctgtttggctgcaatgtctgggctgctttcacaacaatctcggggccaactccttaactcggggcagatggcctgatagccacctagctaatgctaatttgggaaaacagtcctgagataaagagttatagaaagcagattctgtaatcagcctgctggcccaggaggaatggcaagttttatctcctacagatcagaactatttgacttgcagagattcaaggccaggattgtagggtctctagagaaaagtgttttcaggctgggcacagtggctcacacctgtaatcccagcactttgggaggc[134 bp omitted]gaggcaggagaattgcttgaacccaagaggcagaggttgcagtgagcagagtttaccctactgcactcctgcctggtgacaaagtgagactctgtcttaaaaaaaaagtgttttcaaagacagtatgtccatgtcagatgtcatgcaaggaagagcaatgtcctcacagagaagagaacatgctaggggacaggacaaggtgctagaaaggccctgggaaggaggaaagatggatgctgagcatggggcagaaagggtaaatgcatccacagcaggaaacttggaacgagggttctgtagcccttgctctccttccagaatgctgttttttttgggaacagggtctcactctgtcactcaggccggagtgcagagatgtgatatcggctcactgcagcctcaacctcctgcgctcaggtgatcctccctcctcagcctccgaatagctgggaccacaggtgcgtgccaccactccaggctaatttttgtattttttgtagagatggggtttcaccatgttgcccaagctggcctcgacctcctgagctcaagcaatgctcctgcctcagcctcccaaaatgttaggattacagaggtgagccaccatgcccagtctccagaatgctttttactgcacctctggctgaagtaccttttcattcttctcagagcctttcactgagagaacttttagctgaggagaaagaggaaatcccaagtccttaaatgtcaccttctcagagaggtcctccctcaccttctcatctaaatcagacaccttcccctcaccaccgttattctctatcactgtccccaagtacttctctcaatagcattgctcacaatttgcaattatttatgtattaattttcaagttctttgtctggctcttcccctagggcagagacaatcttgttttattcaccaatgtgcattcagaacctagaacagtgctggcacaaggtaaatgttcaaaaactatttgctgagtggcagcaggagtgaatggtgttagggtagctgatccttaaattgggcggtctttgtggcatgtaaataagtgatggtgtaggctgggtgtggtggctcatgcctgtgatcccagcactttggaaggctgacaggggaggatcacttgaggccaggagtttgagaccaatctgggtaatgtggcgaaaacctgtctctacaaaaaattttaaaaaattatccaggcatgatgatatgctcctgtagactcagctactcaggaggctgaggtgggaggaccacctgagcccagggaggtcaaggctgcagtgagctgtgtttgcaccactgcactccagcctgggtgacagaatgagaccctatctcaaaaaaaaaaaaaaaaaaagacagcgttctcatccccctcaacatctgcctgtaggtagaacccaggttagagttaacacaaaggacacaaggaccactcttttgcctactgaggtgaggggaattctgggctgcctctatggcaatgagcccaagtcaattcagtgcccgctctctcctctgccacagaagcccctagtcagctgggggcaatgttgggtgagggtaggtcatgggggggctggccccactttgtgctgccagcagtgctggctggctcccatcagatatatgtgagctcttggcaagcaagagggaagagagctgtggcaagaacaaagtccgaccccacccccacccaccccagacttgcaggctgctgagggacgccaactgggactgggctaaagagaccattatttgtcatctaataatcaggtgtctgggggcaggttatttctcagcaggttgaaaaacagggcacccatgatattttgtttctcctttggccttcctgatagcagggttcacccaaaggcctggctgacctgtttcttttaagggggaccttgaaatatagataaacacccagcctcatggaagcccttctgtaccctcggcttgcctgtgtttttcatggtgccatcctttgtttatgaactgtgggacttttttgttttttgttttttgtttttttgagatagagtccccttttgtcacccaggctggagtgcagtggtgcgatcttggctcacggcaacctccacctcccgggttcaagtgattctcctgcctcagcctccccagtagctgggactacaggtgcctgctaccatacccggctaatttttgtatttttagtagagacgatgttttgccacgttggccaagctggtcttgaactcctgacctcaggtgatctgcccacctcggcctcccaaagtgctgagattacaggcatgacccaccacgcccagcctatgaactatgagacttctgagaactgttaacagggaggataaatggagccaggagacgcctcactttggcttcagtggaacctgtcacggtccagattgtgccactctttggaatttctgaatggtatgaatccagaggagagaaacaacgttctgtttgttctcatgggccctcataccacagacgtttacatcatgggcctgcacactgagaggtgctggtcatgttttcccaccagtgtgaggggtttggatgatcttggcttgtcctcacatttccccattttttattttttgaaaagagaaattaagacagtttattgatcacttactatactccaggcacagtacttggcatactttttaaagttgtctcatttcatttgcattaaaatcatttcaggatatattattatcccttttatatacataagaagatggaggttcagaaaagtggagtaaatttactaagccctctcagctcagaggctaagtgagaatttgaacccaggatgtctggctcctaaacctgtatgttttgcccattcagggcccacaagggatgggaagtctggaacaaattaccgggtggcctgacttcattgcttctcagtatgatctaatgctaaagcacgtttagcttgtttgcctttcctggggagaaacagagaaagggaagaggggtgaagtgaaaaaaaattatttattttttgctggggttcaatctggtctcagcatcccatcccatctggacaatctgatccttttttttttttttgagacagagtctcactgtattgcccaggctggagtgcagtggctcgatcttggctcattgcaacctctgcctcctgggttcaagtgattctcccacctcagcctcccgagtagctgggattacaggcacccgccatcatgcccagctaatttttgtatttttgtaatgatggggtttcaccatgttggccaggctggtcctgaactcctgacctcaggtgatccgtgatccgcccaccttggcctcccaaagtgctgggattacaggtgtgagccactgcacctggccctgagcctctttaagtaggccacagtgttactgtcgtgacagggaaaaggtgacactggaaggggctaaccccaggttggcctagaactggccgttccagtgagctgaggggtctgcataattggataagatagccacactttttcagtcctgcccaagaatatctgtgagaataaaatgaaagttagcctgtgtccatgtctcctgccctaaacaaaaggaagctcagtgagacagaacccccaaagcagtgacttgtcttgcaggccaattacgttgtctccccagcctctctgcagctgttctggcctctgctttctgggatggagcctctgctctgggggccctccacagcccagctccaggaaggtgactgcttcctggtttgagacgtattattaaactgtaatcatactgtgcatggagtcagccaaagcagtggctattaatagggaggtgaagaatgctgactcagaaggaagctgacttaggctggaagggagagcccggccaccttggcctacaattctcagcaggaggtcagtgagagagacctgagctcacttcgttcctgggcaggagtcagcattatctggatttctcaactttggaaatagaaacccgaagcagtcctgatcaaagggatattgagctgtctttcccaggtccttggggagtctccgagcccggagtactgatagcttaaatagctatgactcagcagagcagcaactcttccctcccgatgtcatgagtagatgagacttggaaaggggcactgggactccatttccgtgacctccctcagctgagaagcctgtgctgagccagcccttagctggccggacaacccccattggcagagacacccaattagggagattctgtttctggctccttggaggtgaccattttcatttcaggtgaagggccacggtaaatgaagggcagggtgcaggagggcctcacactgtggagaaaggacatttttagcaatttctgtcaatgccatgcatttctcagagagttcagactttagccgtctggtagactccccatcgtcaggtagctggaagtaagacagatccccgaatctggcccaggatatgccccggagaaacaggactgcccctggatgcacaatagccctcactctgcagcagccaccaaacagccttcacacgtgctgcttcagctcgttctcaccaaccccagcaggtgggtggtatcagccctcttagcgaggaaaacagatttcaaaaaggtgaagtgagttggtcatacagctagcaggtgacaatgacgagactaaaacctcagtctgtctgccgccggaggagaagccaggcatgagctgcccttgtgcccctggcacatgcccatctgtgccacttctacctagacccaggtgtccccgactttgttgctaccccaaagctcacactgaggccagggtagtgaagatctggtgtgttgggtagggggtgctgagaggttgggggagcgctatgtcattctctcgcctttctatcaggtgggtggggatgccgaggtatgtcttctcaaactggaagattcattttggttcctggatctccgtagaaggaggtttggatggaggtaggatgtgggaggtgttttctcttcctccctaaaaatacttattaagcacctcttggtttcagctctgggcagcctgggtgctttcagattatagaacaatttcatgacaccatggatctggtatttttctctgctgtttttcacatagtcttaatatagttttacctgataagaactatccacatgtgtatatctttttagagttctaagatagcataatccacatacttagatgtacctataaaatatctttttacagaataaagggcatgctattaaggaatgacttttcttccactgattgtcatgtggatcacttcctgaacctgaaggaggttctggaactccagacaccgggtcctgagctctagcaagtagctgagggaagaattttcagcccccagctgccaggggttctcaacacagaagcaggaccagaccaagcttttgggaatttgttcatcattgtacagccgtatcacggcctatccggagtgggagggctggagagtaatttcctgaccctcaggctctgagctattgttttggggtcttgcgtactcttttgatcaattattttttctgcctttagccataacaagcaacaggatggtgcagcatccaggttcagaaagctgcctcctctcacttagtcaaagttaattaattctcactgtaccttgaactaggtcagctgcagggctgtgctgggcctgacctgctgtcaggggagggcatttcttgtctgtctcttgatgtgctgtcctgggcagggaaagtgggaagggggtaggtttcacctttgcgtgggatcatctctccccctttcttccggggaggtgaccattttcagatctgtgggtggggaggaaaatcttctcttccaaaaataatctctctgcagtggggtttgaagctggaccaagctgctagcgctatttttacccagcttgcagttcagggtgtaaatagcaactctggctgttttttcccacagctgacaacagagtcaacctcttcgaggcaggagcattctggcatttcgcacagagaaaacagaacacaatttgccctcgggcccagttgatgattcctggaccgtggggtcgatatccagggctggcatctccacggttcttttatctcagtctccactataaacaccaggccccatgagagctgctgggctgaggctcatttaaagaagcttcctgcggaatgatgagggaaaaggcaggtccgtaaatccccgcctgcgcccgccgaggattccaagcgcatgagcagctccaggctccagcttgctgtcccccttgccctccttcttgcattagcaggcacttcctctaaggctgctgccctgggagggtttcttgcaaacccactagatctgaggaaagacagagaaaacatctacttaaggctgcccagatgacagcatgtgtctaaaaatatatgtctcctagttttcgagtgatcgaaggccccacagccttcagcactggagtcatttagaggtcatggtgaaaggactggctccctccttgcctccatttaagcagaagctgcgagaaagcccccaaagccttgggtcatgtctccaacaggctcgggtgagtgggaagttcggcctcatagaaggccccttgctggtgcggttcatgaggacgataaattagcaaagctgaggtgcgcccatcacggtgagcagttctctattgcttctcttctggggaatgaacaggcttcatttgcttttccctgaggccaggtttctaacccaaatctgtccctggagtctttggcctgaaataagaaaggagtcttgagtcagcaggagagccactcctcactatgaattacacagcaactccttgtggatctgcccgtacccttcccccgggcacacatcaatcaatcgaagtatttctcaaatatctaccccatacccagaactgggcatttaggtacgtggttcaagtttcagattcttccagcaaatggtttgtatggggtaagaaaaaggattggaggtcaggtaggcagctgagtaatccccaactctgcctttttaaaagtggtttcagttgcgcatccttggaattgattctgggcagctgttaattgcaaaactcactgccaattatcgatagctaaagtggcattggagagcttctcatggtaaaaataggggcaggtaatagatgagaaaatagctttacatttgagaagagaggatgggaacatattgtctcaatcttgctgtgttcgaggtttcctttgtcagcctgggttctctcccaagactggccagcaaagtctacttagtgacctccagcaaatagtccaccagcaagctacttaagattagag[184 bp omitted]gaggcaggagaatggcatgaacccgggaggcggatgttgcagtgagctgagatcgtgccactgcactccagcctgggcaacagagcaagactccgtatcaaaaaaaaaaaaaaaaagattagagcaaaactttatcttggcagcaagaacagaggggatctctgctgagttcagggcatcctgtttctcaccgggctcagtcacattaaacagccaataccagttttaggaaaatccatgttgaattttaaatgtattttggctcatttggggggttatgattgtccaattcagctggtagtttgtgtatcaaacttcaaatcgacaaacgatgtttattcaaggaagtttcttgaagcctagatggtacatgtttaccttaaaaagcaaaaccaaaaaattccaaaaaacagaaacaggaaaaagtgccctggtgagtaaaaccaaaagcatgtggcagacagacacaatgcaggcctgagtattttgaacaatgctcatggccccagccttgacactggggaaactgggaatgtggtcgcagacttcctatgtcaagtgtttccctggatttcctggaatccaacttgaagtgccatttcccctggtgccaccaaggagttaagctttggttctgttctcccagtgactaagaatgctctgtgtggctctgagatcatccagaaagaaactgacagtcggcgtgggaagagtgtgagctttcagtgctcttgaaatgcctttgatgggcatggtgagagagcaaaaggcttattgccacctagtgcccctgattgtgtaatttcgtcgtgaattcttgtttcttcttttgaattttgcataattttaaatgaagatctctaactccttggggagcttgatattgtgatgtgtgagttattctatggagctattctatgtgagctattctatattttagacagcaaacgtatcccaccacttggaaatatcacccattttgattgaaaacaaagtagaatcaatgacctgaccaaatcacacgtgtgtgtgtgagggagactgggtctttccactcctgatgttttctttcttctgaaaggagtccaaacactccttgcttctctccacccgccccctcttccctgagaaggaggagtggtttaatatgactggtgagtttggaaggaggaactgtgccttatatcatcctctcttttcttcttgggagcaagcttcgctcccgtggggtgggaagagtaggcccattccagctcagctgcctgtcatcgagccgccaagtctgcctaactctgaagttgagtatcgggaagctcgattgtctgatgatataagccacgttctctaatatcagctttatcagtagaaaaggttatttttggtcctcatctagcttgctgctatcttctgattcaattcaaaattcacagagaagggagcagactgctattttggggcctcctcaaagaccccaacatatttactggaagatttcctgtgattagaaaaatcccagtgttggggtaaggtccaacttatagatccacatcatcactttcttatataacaccagattccttagctgtcagctgagtaaaagagagtttatgggtgttccttgcagctaaaatgcatccattcaaaagttatttattgaatccttaccacgtgccaggggacacataagtgatcaagagaaacagtcttgggccgggcgcaatggctcacgcctgtaatcccagcatgttgggaggccaagttggttggtcatttgaggtcaggagtttgagaccagcctagccaacatggtgaaaccccatctctaccaaaaatacaaaaaattagccaggcatggtggcagacacctgtggtcccagctacttgggaggccgaggcacaagaatcacttgaacccaggaggcggaggttgcagtaagccaagatcacaccactgcactccagcctgggtgacggtagtgaaactctgtttcaaaacaaaaaaaaaagaaagaaaaaaaagagagagacacagtccctgctgtcacacagtttataatttaactagggtgtatcaatttaaaagtttaatgtttcaagtgaaagaaaacaatctcaaataggcttgagtaatacaggaatttattgtctcactggagatccaggcacaatttgatccaagattcaaacagcatggatccatttcttggctctgcttcctttgagttggattcattctttagccaccacatgttggaacccctctctcctggcagcttcaagttttccacgacggctgcagcagatctaagacataccatttaccaggctgacaagagtccaagttccagcaatccctggaggtccatcctgagaaggccatctcaggttatagaccagcataaatcgggagctcacaggacagaagacactgattggctcacgcccagtggggcccaccccctgatatgggaaagttgggccctttccacttccagaaatttgggcacctatttggaagggagaaagggccacaactaataactgtttatgatagaaggaaaaacaataaatatgcttatacttctgctctgagggaatcattcagcctgcagaaaatggagacatctcattactacctggcgagtcaaacacaggcctggggatccagagatgtatttggattccaaattctgtgtgggcccctatacacagctgacccttggggacactgtaaaggttgatacatgatagactttgctccttgatctggcccttcagtagttacccttggactgtattctgctgtgtgatagcttttcccttattgattgattgattgattgattgattgattgatttgagatggggtctcacccaggctgaagtgcaatggtgcagtctaggctcactgcaacctctgcctcctgggttcaaatgattctcctgcctcagcctctcgagcagctgggattacaggcgcatgccaccatagccggctaatttttgtatttttagtagagatggggtttcaccgtgttggccaggctggtctcgaactccttgcctcaagtgatctgcccgcctcggcctcccaaagggctgggattaccggcatgagccaccacagaggagagtatgtgcctgagagagatgctaaaaggatgactgagatgatattcgcaaagtatgtggcgcaagtcaccaaataaacctaagctatctgttggcgtgtgttcattattctttcagatttaaggacattcagctggtggtttaggggctaaacattaaccacagtggggcaggtcaacacaacatgagctgtgagccatgaaaatacacaggccttcggtgttctaagttcaacagacctgtgtgaaaaaacgtataaccaaaacggattgaaaatggacagaaatgcagtcaaacatgcagggtagagagagtgctccagctaagacctcggccagttctttttttttttttttttttttttctttcaggacagagtcttgccctgttgcccaggctggagtgcaatggcgcgatctcggcttactgcaagctcctcctcgtgggttcaagcaattcttgtgcctcagcctcccgagtagctgggactacaggcgcaggccaccacacccggctaagtttttgtatttttagtagagatggggtttcaccacgttggccacgctggtctcgaactcctgacttcgtgatctgcccgcctcggcgtcccaaaatgctgggattacaggcatgaaccaccacgcccggcccttggccagttcttaagaggcacgagtacttgctgaacaacttaaagtgccagtggtgcctgagcaatcctttatttcttcattcagcaaacactttttaggtatcttctatacaagaagctataataaaaacacacaatcagtttatgaggcaggcacttaaatcctttttagaataaagaagggacctccctttataaataggtaaatgattataaaaattatatgcaaagctaaaatgaactaaagatctactattacacaggagacagaaaagagaaaactagtttcagtatttgggtggaggctggagaagaagtgggctatatctgggatggaatgaaccgactttgtgttaagtcataaacaaatatatagggctaagtggagagatggcaatcaattatacaaagtcttttttggttgctcaaagaaatgtgacccagtcctctgaacgccctacagcagcagtttatttgcaccttgcctactgctcttattctaacttgtatcacagtcggttatttattcattcaattatttggttactccttgaacactgatgcaaggcttgatatgtgctaaatattgtgtcaagggccaggatacaaaatagagtgagacatggtttctgtagctcagtctaggaggggaggaggcataaaaaacataattatagcctgagcacagtgccttccacatgtaattccagcactttgggaggtcaaggagggaggattacttgaggacaggagttggaagtcatggtacgctatgattgtgccactgcattctagcctgacagagcaagacctggtctctaaaagaaaaaaaaaaattattatctaacatgagaggtgctataatagaaatatgccctgagtgcttggaggtgaagtcttcacaaaagaagtgatatttgagtggatcttgacaataacaggagtttcctaggctggatttccaaagtagctggaaagcccctgaaagaggagccagaatggtgtgtgaggaaatgctgagtggtttggtatgtggggatctttgggtatgtggggagagtgtcagcagaggaggctgaaaacataagtgggctaaaaggtaagtcacacagagcttcatagatcttgctatgggctttgaactgtgtagacagaaggatttgttgaagaattttaagtaaatgattgagaagatcaagtttgggctttagaaagacgttctggaagcagtctgaaggaagagtagtagtggggaaggactggaggccaagaaatcaacaggaacgctatttcactaatctaggtgagaagtgataacatcttgatgactgaaaaagagggaacagaatgggttcaagaaagaactgagagattaaatcaacaaagcttggttattgtttggaaggaagattatgtagggaaagaaggcattaagaatgacttggagctgggtgtggtggctcacacctataatcctaacactttgggaggctgtggtgggtgggtcctttgagcccaggagttcaagaccaacctgggaaacatggcttaaacctcatttctacaaaaaaaaaaaaaaaaagcaaaaaagtagccaggcttagtggcacgtgcctggagtcccagctacacaggaggctgaggtgggaggattacctgagcccaggacattgatgctgcggtgcacaatgaccaagccactgcactctagcctgggtggcagagtgagaccctgtctcaaataaataaatataaataaataaataaaagaatgatttagaagtcactagtccatgcagctgaggaaacaaaggtgccattaaccacagtagggaatagaagaacaggaggaaagataaagacaggataatgacatgctgtgtttaagatgcctgcacgacattcaagtggacaagccccactggcagttggaaatctctgcctagagttaatgagagagctggaggctagtgattgagctgggaataaataggtgccaaggctatggacataaagggcacacacccaccaagtacagctggaaagtgagaagataagagacaccagcacagaccctatagagcactaacataaatgaattgatcaaagaggagccagaaaaggaaagtaaaaagaggtgtccagagaacagctaggagaactggcagagaccaacatcttagaaggcataggagacaagaagaggaggcagtcaagtaggtcagagctgctgagaattctagtgtagcatttgtgacatttccccattaaagagcaaagcctgtgacagtaggaactcctggcacagtactttgtataaagcaggcagtatctgtgccaggatctatagatagacatatagatgtaccaatttggaaactgctagtaactgctagatgcccagagacctcaaatctggaaacactgcaattttaaagtgttatttaaaggtcaaattagcaataaaaacagtactatatatatatatatatttttaatttttaaaaatttttttttcaagatggagtctcgctctgtcacccaggctggagtgcagtggcacaatcttggctcactgcaacctctgccccgcaggttcaagtgattctcctgcctcagcctcccaagtagctgggattacaggcgtgctgtaatttttgtacttttagtagagatggggtttcaccatcttggccacgctggtcttgaactctgaccttgtgagccacccgcctcggcctcccgaagtgctgggattacaggcttgagccacggcatccagccaaaaacagtacaatattaaaagagattctagctttcctcaaattccattaaaaattattactaccaccttgtgtatttcttcgtatttggtcttcaggagaagatacatggtcagcaatataaaatgaggaagctggggcaatataatttatcagaacagaggagttcagttgcagttgctggaacacagaaattggtgtcaatgtgtttggcctttacaaaagtcattctgagggcaacatcatggtgttttaggaactaagcaatttcttcctcccctttctcccctccgcctcccccctccctcctcctttcccctctcctccttcttcttcttctccttcctcctcctcctcctcctcctctttcttactccttccattctgttgcccagactggagtgcagtgaccttggctcactgcaacctctgcctcccaggttcaagcaataattttctgtatttttagtagacacgggtttttgctatg[136 bp omitted]tttttcatttgcccattctttcaacgttgagcacctcatatgttcgagacactgagtttgtcagccttttgacatctttccatccctcaaggagctcacagttcaggggggacatagacaggggaatacaatggaaatatactgagaagtgctgtgccagaggtaagcacagtgtgcaaatgaagacagagaaagacaacccaactcaaagggcagcaaaagagggcagtggcgtaaagtctttccagaagagacaatgcctgccaggtgttacaaggagggacaagcttccagatcaaggagacagcaactgtaaaaaaaaaaaaaaaaaaaaaagaaaagaaaagaattcaatatggctgaacacagagtacaagcaggggaagagtgagagatgagctgggtgggcagggacctcatcagaccccagaagcccttctaaggattcggagcttgagcctaaaagcaatgaggagatgctgaatgattatgttagagcacttcaaaggaagtcgtttgcttctcatatttttcttatttcccattctctctctctcttttccttccttcctttctttttctttttttctctctctccccctttctttttctttcttcctttctttctgaaattgcagctgatccttcctcccctccctccctccctctctctctctccctctctctctctctctttctttctgaaattgcagctgatctggtctatacccaaagagaataagtgcaagggatttatttacagtatgtccatggttgggtggagaaaaagatggagttgatccctgaaacctgacttttgatggcagtaagtagcaaaatgagaggatcccaggaataattcctatctcccacagacttttcttccatctaaatctggagatgcctgtgttcgattttcatgaggaggctgttacctccaaggtgtggacaggaaccttttttttcttgccaaatgagcaaagaaaggaatcttaattacagagaggtctacactcttgctacttgaaactgggtccctggaccaatagaatcagcatcccctgggaactggttgtacagacagaaatctgaagctccaccccaaacatactgaatccaaatctgcattttaaacaagatgcctgggtgattcccatgcacattcaagtctgaaaagtcctgatctacaagataggaaaactgcctagttggtaaaacttagggtactgtgttgcaatctgtgttttgttttgcgtgactgatttatgagtaatcagtttgtcagcctctatgattactaatttatgtccaaaagcaaactcaatcaggggctaaaccctttctactctactgaacatttctaagaaatctccacagagcccacgatgttgtgatccatttaaatacaggacttgctctctggctgatgagtaaaagattcgttcttttttttttttcctattgtggcaaaatgtgcataacatacatttaccattttaaccatttttaagcgtgcagttcagtggcattaaagacattcacactgttgtgcattcatcactacatcacctctagtgttttcatcttcccaaacggaaactctgtacccgttaaacaataactccccatcaccccctacctccagaccctggcaacaaccattcgactttttttttttttttttttttgagacggagtctcactctgtcacccaagctggagtgcagtggcgcgatcttggcttgctgcaagctcctcctcccgggttcacgccattctcctgcctcagcctcccaagtagctgggactataggtgtgcgccaccacgcccagctaatttttttgtatttttagtagagatggggtttcaccatgttagccaggatggtctccatctcctgacctcatgatctgcccacctcagcctcccaaagtgctggggttacaggtgtgagccaccgcgcctggcccaccattctattttttgtctctatgaacttgactactctaggtagcgcattgaagtggaatcatactgtacttgcttttctgtgactgtcttatttcacttagcataaggttgtcaagtttcatccatgttgtagcatatgttgacatttccttccttttgaagttgaatattttgctgtatgtatctaccatattttgtttaccattcatccatcaatggacacttgattggctcccaacttttggctattgtgaataatgctgctacaaacatgagtgtagaaagcttcatttatgccagcatgcaggtcccctcttctagcttaccaacattattttctagagagatgccacaacaaacataaattcacagttaagggatgctctcaatggattttctctgtctgtctgtctgtctatctgtctctctctctctctctctatatatatatatgtatatatatttttttaagcagagacagggtttcaccatgttgcctaagctggtctcaaagtcctgagctcaagcgatccacccacctcagcctcccaaagtgctgggattatgggcatgagcctcaatggattttctttaatatatcaagtctctagttgactccttacgaagaaaagagaatttgctgttgttgggagcaaaatgtctgttgcagttagtctctgtccgggagtcgtgccctcctgaatataaactcagggccagagccaagactttaatttgtgaagcacaagtattgatttggtgacaccattgtcttcccctgatgctgttcctatcaacccaaattatctgtgtgaacataggagccattttttccgggtgtgctgggcagctggtgacaagctgcttgccgataggccctgacagagatgaacacttggctgctgttgggcagtcaacactgtccttgccagggcgttgctgggcaaaggaatctgcagccctgaagccgatgagcatacaccaccccaacagacccagtgctccatgctgatttcagcaacccacagcaaggctcagacaagggaagaggctctcagcttatgggtgaactattccttttgttttgttttgagacaggggcttgctctgtcacccaggtagcatgatcttggctcaccgcattactgcagcctcagtcttccgggctcaagcgattctcctgcctcagcctactgagtaattaggaccacagccgtgtgtcaacatgaccggctaattaacaaaactgtagagacagggtccccctgtgttgcccaggttggtgttgaactgggctcatgcaatcctctcgcctcagcctccaaaggtgctgggattacaggcatgagccaccgtgcccagcctgggagaactcttctaaagaactatgtaaagggtattatgtccccccaaatgatctggagtctcatttcctggtgttacttcaggaagctgtggggtcagctccctttgtgtgctttccctcaggggcccagtgggctgctctgacactgttcacttcatcccactatttcacctctgggacaactcttttggttgccacatatgtgcaaggatgagaaggatacaatcacaccacctcatttggaaaatacacgctgagactcttgatttcatcttctgtggaatgacttttgctttgcaaactaaatctggatgttaagacaggggaacaaccgcaagttccccattttcatgttaactcctggccctcaaggatgattaactttagaaactgaaaacgcatttgggctaatcgtttatgagatctgattaagagctttacagagaagatttgcaccgctgttaagaaaggctctagcaattcaggagaatgcacatgtaagggatttccttccaccggattagaaagaagagctagaaaacacagctgaagacacgagagaggaagaggtgaagacctgcctgtacgaatccaaagaaaaaagtctgtatgtgggtgaacacatctgaagaagttccatgagaaccactgactaaaatgtaacgtgactaaataacgtgtgtgcagccacgttaatgtgtgacgtgtgtagctgcaaggatctagtgaaagtctgggaatatgcataaaagaattaagtatttgtaggccactgtctagaatttacaatttgcctcctcccagatttgtcctgatccgtccacttgcaatgcccttctctgtctttccttctccattaatacatgcttatcaccttattcaagagccaaggagaatctcaccacctgcaggaagactgcccagactgacccctcttaactgtaatcatcctttttttttttttttcttttttaagacagaatctcactctgtcatctaggctggagtgcactggcccgatctgggctcactgcaaccttcgcctcctgggttcaagcaattgtcctgcctcagcctccagagtagctgagattacaggtgcacaccaccatgcctggttaatttttgtatttttagtagagatgagttttcaccatgttaatcaggctggtctcaaactcctggcctcaagtgatctgcctgcctccgcctctcaaagtgctgagattacaggcctgagtcaccacacctggcctcttaactgtaatcattcttttaaatgcaccctctccaaatgtgtgtgtcctacatgtcctaggggagcccacacggcattaacggcatctttcttaatgatcattttcatgccactttccatatgtgtggtttgtgttcctaaaccagtctacaagctccttgaggtggggactatttgggaggagaaagggtgtggtttgtttggttgctgttgttcttggccttttctcttggatatcctaaagcagtgcttcttaaactttaacaagcacattaaatgcttattattgttacatattatatgcttattaatgttacctgttaaatatttattaatgctaaatgcttcttactaaaatgcagagctgatttagtaggaatgggttgggcctgagatcctgcatttctttgtctttgtttcttctctctctttctttcttccttttctttccttccttccttcgctttctttctttccttttttttttttttttttctaaatggagttttgctctgttgcccaggctggagtgcagtggtgcagtcacagctcactgcaatctcaaactcctgggctcaagcaaccctcccacctcagcttctcaaaggagctgagactataggcgtctatcaccatgcctggctagattctgcattgccaacctaagtgcggctattggttggaggaccacacttttgagtggcaaggctttgtaattcccagaatagtgcttcaacataaacaagcaagacttttggtagtattctaggaaaattcccttctgaggcccaagcccttcaagcaaattctaccttgcaataaggcgtttcctctttgatcactagactgccccctaaattaactgcagcctgaggacatgcttttgttatagtgcagttgtttgaatttgtgtttaaatctaggaatacagatagttttactaatgtaatttgagaagattggtgagttattttgggtatgcatggcctagccctgcaatcctaggattctcttgataagcgccacaattataccagctgatcccataaaaaggcaaaacagtctagcccgcatagagtgctgacagctgtaacacccccttctggacgaggggtcttcgcttttcccccaggtgggttaggtagctggaagcagacataaagcttttattttcctgtgcctggtaagtctctgtttcctgtggaaagtcccacttcatcagaggcaaagaattctctcttagtttcacctctgaagctaggaaaattagcctttaaccatactaaatagacttcaataaacgtttttctattttctttttaaatagagacagggtgtccctatgttacccaggcttgtctcaaacacctgggctcaagtgatcctcccacctcagcctcccgaagtgtcggaattacaggcatgatcctagccaataaatgttttttaactgggagggacagaccagaaggataagccggcactaatgaaaccagaaagacacttggctggactcctagcatgacaccagcaagaggaaagtcaaggccagatgccatcgctcacacctgtaattctaacacctcggaggctgagctgggaagatctcttgaggccaagagtttgagaccagcctgagcaacatggcaagaccacccccctccccatctctacaaaaagagtaaaaaattagccagatctggtggtgcatacctgtagtcccagctacttaggaggctgaggtgcttgggcctgggagttcaaggctgcagtgagctatgattgccccactgcaccccagcctgggtgacagagcaaaaccctgtctcaaaaaaaaaaaaataaataaataaaggagagtcaagtctctcagggccttggtttacttatctgtaaaatgaaggtattgggctagaagattcctagcagccctaacaggttaactaacagccaacttgggagaaaggcaaagagacaagaattccaacgctggctacttgacagcacaatgtgactggagtctcttggctgacttgtattctctcactggtctcagcccaaatgcttgccctgatatggtactaagttatcccttcctagaaaagttggtgcctcacatccgcctgcctgttgtagaaagacgtgaaaagacacgccctgtgctgccacctagtggttcctcttctatcaaggcagggtagactcttcctttctgttctccatccaccggctatgagggtctaacaggagagactaaaaataatgcacttccaggtgccaccgctttaagggaatcagggactatgactaagaactacaaggtcttctaaactttataatttcctccgtattgttatttcctgtctgtttcgctgcagcgattagcagtaaaactctaaaaacaaaaatgaccaaggttgtttttaaggtcagcaaggaagcagggaactggggagagacagcaccccagggtttgaggtaaacaacaccaggagatggagtgggtggaaggagctgaatagcggaaaggaaagagggtgaagtcctctggcttgtttgaaaaaggaaagagggggtgggaggatgaagttgccttttagctggaatgaaagtcatcatcttaatagcattgtcattctttcctgttttgtctttagatgcacaaatctgttttcaagcctggaaaatgaagcaaatgtgtggttttcagctactgttgcagttcaggggcctttgtagcaaatgatactcccctagactaaggatccgaaatacaaatgtctatagaaaggccacgcagatatcgtacttggatggaggcagccagaggtaaggctgttgggagtggtggggactgtggtaaacaggagagtactcactccatctaaggaagcagaaacaaccagtcccaggtgattatgggcctaaccaaaccgtgtacccacattgctagatctttcacattttcaggagaagctggaaacttggattattatgtgaagtcaccttatttttaaatgttggcggctaatgttgcttaaaaacaaacaacagtactctgagccaaataaaacatatcaatgagacatatttagctcaaaggccaactctttgaaaacatgaatacagagcattttgcaatctggaacgctaaagcactaatatgattttttcaaggcatgtggtcttcttctgaataacaaatgacaaggcaacaagcaaataccaggtaaactggggaactgcaaaatgctttgtgttacgatttgttaaaattgactattgtgcctagaaatttatataaagagctagtttgttaatttttcatgtccaactggaaagctctgatatattctttcaataaatcatgaaacatttattgagcacctaatatatgcaaagtaaagataaataggctgggtgccgtggctcacacctgtaatcccagcagtttaggaggctgaggcgggaggattgtttgagcccaggagttcgagaagagcctgggcaactcaggaagacttcatctcttcatcttcatcttacaaaaaattttaaaaattagctggatgtggtggtgcatgcctgtagttccagccacttgggaggctgaggcaggaagactacttgagcccaggaggtcaaggctgcagtgagccatgatggtgccgttgcactctagcctggatgacagagcaagaccctgtcttaaaa[136 bp omitted]ggcccctgtaatcccagctactcgggaggctgaggcagggagaactacttgaacccgggaggcggaggttgcagtgagctgagattgtgccactgcactccagcctgggcaacagagtgagactgtctcaaaaaaaaaaaatacataaaataaaataaaaataaaaaaataaaaatttaaaaagataaataaaacttttcctataaaaagtgtcagattgtatttactttatttcttttttctttgttttttgagacacagtcccagtctgtctccccagctggagtatagtggtacgttctcagctcactgcaacctccaccttctgggttcaagcgattctcctgcctcagccttctgaatagctgggattacaggtgcccaccaccacgcccagctaatttttgtctttttagtagagacggggtttcaccatgttggccaggctggtcttgatctcctgacctcgggtgatccacttgccttggcctccgaaagtgctgagattacaggtatgagctatgatgcccagcccaaatagtaagtattttaggctttgaggtccattcagtctccatcacaactattcagatctgcctttgtagtcacaaagcagtcttagccaatacataaactaatggatatggctgcgttctaataaaactttatttacaacaggcagcagtccaaatttggcctgtaagccatagtttgccaatctcagatgtagaagatttaagagagcttgcagcctaatgcaacagttttatttttaaatatttacatgtttatattttgcctactaagacaaggaattagagtaatattgctatggtttttacgttatattttgggtgacaacactgatttttttttttttttttttttgatacagggtctcacttgtcacccaggctggaatgcagtggctccatcatggctcactgcagcctcaacctcctggactcaagcgatcctcccctcaggctcccaagtagctgggactataggcatgcatcaccacgtctggctaattttgtatttttttgtagagacagggtttcgccgtgttgcccaggccggtctcaaacttctgggctcaattgatccttctgcctcagactcccatagtggtgggtttacaggtgtgggccaccatggctggccaaaaacatcatatttttgactacaatagttacttcagtggagtggttcgatttctctgtgttttggttggacttgaatctgttgtgtggctctcacctgtagtcccagctactcaggaggctcaggtgggaggatcgcttgagtctaggaggcagaggttgcagtgagccaagattgtgccactgcactccagcctgggtggcagagcaagaccctgtctcaaaagaaaaaaaaaaaaaagaaaagcggccaggcacggtgattcatgcctgtaatcccagcactttgggaggccaaggagggcggctcaccaaagatcaggtgttcgagaccagactggtcaacatggtgaaaccccgtctctactgaaaaaaaaaaaaaaaaaaaagctgggcatggtggcatgcacctgtagtcccagcaactcaggaggctgaggcaggagcattgcttgaacctgagacatggaggctgcagtgagctaagattgtgccactgcactccagcctggatcacagagactccgtctcaaaaaaaaaaaaaaaaaaagagaaaagaaaagaaactgtagtgaagaggcaacatgaagctgagtacacttgattgtttccagagtcctagaacttcctacctggaactttcaaaaatatgttctaaagagagcaaatgaagcagtatatcattttatttatttatttatttattcatttatttatttattttggagacagagtcttgctctgtcacccaggctggagcacaatggtgggatcttggctgaccgcaacctccacctcctgggttccagcgatcttcctgcctcagcctcccaggtagctgggactacaggcgcccgccaccatgcctggctaattttttgtattttttagtagagatggggtttcaccgtgttagccaggatggtcttgatctcctgacctcgtgatccgcccgtgtcagcctcccaaagtgctgggattacaagcgtgagccaccgcgcccagcaaaaatttctgaatagggatgcttccatttggcctcatgacccttccctcttcttcctgacctagaacacagatgcaatagcttagaggttcggcaaccattttgtgaccgcaaggacaaaaacaacaaactaaggatggtggagtggagagaaagaggaagctttaatgatatcattgagcagcatcactagccctgagtggaatacctttgggtttcttattacatgagaaaaaatacagtccccatggagtaaaaccattattatctggctttctattacctgcaacctaaccctaagcctttctatttggggctatttagagtttcctcctattttcacagtccatcaacattgctcaggaaatgaaaacgcaacagcgatctggcatgcaatgcagttgtattaactccccctcttcctgtgccactttaaaaagttgaagttaacattatttaaaatcttgttacaaactcaaataacatataaagatcaaaatccattgagtttcttaggaagaagtcttattacaatacatcaacatcaagttcaaagaaaatgttctgtaatacagctaagaaaatcaaagcgattgtcaacagatttttttgaacttgttttaggtagcaaacattttatgccaacacgctatccaaaatgtgtttaaaaatatataaatagggccgggcatggtgactcacacctgtaatcccagcactttgggaggtcaaggctagaggattgcctgagcccaggagttcaagaccagcctgcgcaatatagtgaaaccctgtctccacaaaaaatacaaaattagcctgggatggtggcttgtgcctgtagtccctgctatttgggaggctgaggtgggaggatcgcttgagtccgggagatggaggctgcagtgagccaagatggtgccactgcactccagcctgggggacagagcaagaccctgtctcaaaaaaataaataaatgaaaatgaaaataaattatatatatatatgactatagtctatattttagagttttttaatttttttgagatagagtcttgctctattgcccaggctggagtgcagtggcacaatcttggttcactgcaacctccacctcccgagttcaagcgattctccttcctcagcctctcagatagctgggattacaggtgcccgccaccataccagggtaatttttgtatttttagtagagatggggtttcaccatgttgcccaggctggtcttgaactcctgacctcatgtgatccgcccgcctcggcctaccaaagtgctgagagtacaggtgtgagccaccatgcctggctacattttagagttttatgtcctccaaactcatcatgttttgtgacatatacgttagatgattataaagatctttcaaacatcagagctcccacttgccaaatttaggacaatttgatgtattttgtacatcaaaaaataatggattataacatgttaaatgaaatgtaaaagacttatgaattcacagtgattcagaagcatgccagctaataaatgtagacaaatgatagaatttgagtttgtaactgccaatgtaatcattgattcagtttggctatcatcaatgattttatcattgagtgaaaggatgttggggaataggataattacatggttccagagttgcaccccagagatcaattaataaattcaggccaggcatggtggctcacacctgtaatcccaacactttgcgaggctgaggtgggcggatcacctgaggtcaggagttcgagaccagccttgctaacatggtgaaaccctgtctctactaaaaatacaaaacttagccagctgtggtagcacacgcctgtaatcccagctacttgggaggctgaggcaggagaattgcttgaacccggcaggtggaggttgcagtaagctgagatcgtgccactgcactccagcactccagcctgggcaatagagtgagactccgcctcaaaataaaaaattaataaattcaaagggaaaatgtatctttaccatggagagatctggtgaataccctcttaaccaagcaatcaaacttggcatcactaatagtaaaacaatggatggcctcctgttataatgcactaagagatacacaacacccatatatagaattctgctggaattgtttaacctgaaaataaacataagggaacaatcaaggaaattcagaatctggaaaaaatctgcaagataactggcctggattctaaaaaagttcaatgtcatggaaaacaccaaaaggtggggattttctgagactaagagagaccaaggagataaccagataccatatgtaaaccttgagtagatcctggatgggagggggaaagcctgctagataagacatttttaagatcattggagatagtatattaaattgtcttcttgaagtgatgttaattttcttattctgattgtagtgagtgttattgtggttatatactagaatgaccttttcctaggagatctgtaatgagatatttaggggtgaggtgtcacgacagctgcatactacctttaaaaaagtgtgctggccgggcacggtggctcatgcctggaatcccagcactttgggaggcca[133 bp omitted]gaggcaggagaatcacttgaacctgggaggcagaggttgcagtgagccaagatcatgccactgcactccagcccaggtgacagagcgagactcaaaaaaaaaaaaagtgttctgtgtgtgtgtagcagaaaatgtggtgaaatgttaatgattggtaaatctatgtaaaaggtttaggatgtttattgaactattattccagcttgtttggaagtgtaaaactttcccaaaatagaaacttcatactatgcctcggaattttattgtaactgttattcttctggtagatattaagatgtactagctagacattctgacacaagctgtaggtatcacataagcattattcagtaaagattatttgagtctggcctactacaagccagacatgattttagacaattaggatacttgaatgaacaaaacagagatctctggtcctgtgaagcttatattccgggggggagagacagacagagacactaaacataataagtaaataaattgtgggaaaaaacagtcgagtaggagttaggggacaatttgggaaatactaaagtggagacttagataaataaatgaaagaagcatagagatggatttagggaatattgagataatgtccaaattttctattattctaggatatgctggtttggtttcacctgaagaatactgcaccttttaatcacacgaagccatttcaagtattcctagttagtattcacaattggtatgcatttcaggcacaccaattctgaatcctaactaggaatacactggttctctttcaccttttactgaatcccaactagggtgaccaggtgtcctggtttgcccaggactaaggggtttcccacgacatgggactttcagtgttaaaattgggatagtcctgggtgaactgggatgggttggtcaccttaatactgctacttgccacttgtgtgacttccagtaaatcatttagcttccaagagtcctgatttcgtcatctataaaaaggacattatacatacacacatatatatatatgctccaacatggatgaatcttggaaatattatgctaagtgaaagaagctagacacaaaagatcacatattatttttttaaattcttcttattattttttgagactgagtctcactctgtcacccaggctggagtacaatggcacaatctcggctcactgcaacctctgcctcctgggttgaagcgattatcctgcctcaacctcctgagtagctgggactacaggcatgtgccaccactccctgctaatttttgtatttttagtagagacagggtttcgccatgttggccaggctggtctcgaactcctgacctcaggtaatccaccagccttggcctcccaaagtgctgggattacaggcgagagccacgacgcctggccaaaaggtcatatattctatgactccatttctctgaaatgtctagaataggcaaatccatagagacagaaaatagatgagtgattgccaggtcctgcaggaagtggagaatgggagttgactgcctcagggatgtggggattttttttggtgggggggtgggtgaggaaaatgatctagaattagatgataatggttgcacaattttgtaaatatactaaaaaccactgaattgtacatttcaagagggtatattttatgtgaattctatctcaatgaagttcttatttaaaaaaatacaataacatggagttaccatatggtatggtttggatgttttgtcctctctgaatctcacgttgaaatgtggcctccaatgttgggaggtgattggaaggccctccttaactggaggtgtttgggtcatggggtcgtatccttcatgaatggcttggtgttgttttcacagtaatgagcgagttctcactctatgagttgactcaagatctggttgtttgggggaccgtggcacctctccagcccttactccttctttcactgtgtgacgtacctgctcctccttcaccccgccatgatcataagctccctgaggcccccaccagcttcggcaccatgcttcctgtacagcctgcaggaccatgagccaaaataaaccctttttctttataattacccagccacaggtattcctttatagcaatacaaacggactaacataccgtataacccagcacttccacttctagatatatacctgaaaaagaaataaaaacatgcccacacaaaaacttgacatggatattcatagcagcattattattatttatttgagacaatgtcttgctctgtcgtctaggccggagtgcagtggtgcaatcatggcttattgcagtcttgactgacctcctgggttcaagcaatcctcgcaccttagcctcccaagtagctgagaatacaggctcacatcactgagcccaactaaatttttttttttttttttgagacagagtctcactctgttgcccaggctggagttcagtggcacaatctcggctcactgcaacccccacctcccaggttcaagcgattctcctgcctcagactcccgagtagctgggactctaggtgtgcaccaccacaccaggctaatatttgtatttttagtagagatgggattttaccatgttggtgaggctggtcttgaacccctaacctcaggtaatctgcccgcctcggcctcccaaagtgctggaattacaggcgcaagccaccgcacctggccccaagcccaactaattattttttatagagatggggtcttactatgttgctttggctggtctcaaactcttggactcaagcaatcctcctgtttcagcctcccaaagtgctgggattacagacatgagccattgtgcctggctgcagcattatttttaatagccaaaaagtggaaaaagacccaaatattcatcagctggtgaatggacacataaaatgcagtatatccgtgcagtagaatattatttggcaacaaaaagaaatagaatactgatgctatgacatggatgaaccttgaaaatattatgctaagcaaaagaagacagtcataaaagcatattgtatcattccatttatgtgaaatgtccagaacaggcaaatccatggagacagaaagtagattagtggtttccagggactgggagaaatggaggaaaatggatgtgactgctaatgggtatggggttgcttttgggagtgataaaatgctctaaaatgtatcgtggtactggttgcacaactctgtgaatagactaaaaacaagtgaatggtacactttaaatgaaagaatagaatggtatggtaggcaaattatgtttcagtaaatctgttaaacaagaaatagataaaaaatattttagattaaaaaaatgattataatgtctgtgtgaggtctaagtgagtctttgctctcctcccctgaaacacacatagttatcacaccaaattatcattgtgtatgtctttgtctgtcttgtccactgaactgagacccctgggatgacagaaactttctaattcatccagggatagcccagtgtggtgatgcatgcctatagtcccagctacttgggaggctgaggtgggaggatcgcttgatcccagaagttagagactgcagtgagctatgatcatgtcactgcactccagcctgggtgacagagtgagacccagtccctaaaaataatagtaataataaaaatcaagaataggccaggcactgtggctcacatctataataccagtatttcgagaggccaaggagggaggattgcttgaggccatgagtttgagaccaatctgggcaacatagcaaaaccccatctctaaaaaaaataaaattaaaaaaaaatatatatatatgtatttcacacgtggccaactttccgatcatgtaagctgtgcagtctcacaagaccctatgatcagaaggaccccacactttgttcaatgccctgctgtcactgtcttgaaatttttaatactacggtatctgaataaaatgtaggtgcccctcatcattctgcactgggcgctgcaaatggtgtagctgtcctgaagtcacctttgtacccccatcacttagcttagtactgatgcgcggtgggtgctcaataaacatgaattacttttcccagtcccagtaccctaagaacagcccaatgaccttccacaccgatttacctagagcttcctacctgccagggactgttagctgctgggatacagggggagccaaagcaggcagctgagactcttcccatcactgcaggggaagcattgaggaggaagctgttcacgaagccacacgtgcctacctaactactatctccagcagcaattacagcatctgactcatttgtacttttagtcagagaaaaacgcatcaccttggaatcctgatcttgtgagttcttctttgttacaggaaacagaaggctctgatgaattaggatgggactttagttcttttccacggtgtgaatttttcagtgtgcttgtgaaagatcacattgacatctataattaaagagatctgtcagcatcttttaattcaattcagtttctttcttttttttttttttttttgagacgaagtctcgctcttgtcccccgggctggagtgcgatggcgcgatctcgactcactgcaacctctgcctcccgggttcaagcaattctcctgcctc[134 bp omitted]cggcttcccaaagtgttgggattacaggcgtgagccaccacaccctgcctgcctgtttcctttttttcatactatttaagctaccaaaaagttgtttatttttatttttttgagacagggtctcgctcagttgcccaaccttcaattcagtttctatgtagaaaacactttgttaggtactgctggtacaaagactgtagctgggattttctttttctttttttttagactgggtctcactgtgtcaccaagtctggagtgcagtgacacagttgtggctcattgcagcctcaacctcctgggcttaagctatcctcccacttcagcctccatagtagctaggactacaggcacactccaccatgcctagctaatgttttaattttgtagagacgggggtcttgctatgttgcccaggttggtcttgaactcctagcctcaagtgatcctcctgccttggcctcctgaagtgctgggattatagatgtgagctactgtgcccaggctgtgctggatatttcttttttttttcttttttttttttggagacagagtcttcctctgttgcccaggctggagtgcagtggcacaattttggctcactgcaacctctgcctcccgggttcaagcgattctcatacctcagcctcccaagtagctgggactacagacgcacaccaccatgcctggctaatttttgtattttagtagagacggggtttcaccattttggtaggttggtctcgaacacctaacctcaagtgatccacccagctcagcctcccaaagtgctgggattacaggtataagccaccgcacccagcctcaatggctggatatttctaagctggatcacgtgagcattttgacagagattagggtgagctacaacttcatgaggagttagcagagagagcaataaaattcctaatagacctgggttccacttgctacatttttttctttctttttttttttttggagacagagtctcgctctatcgcccaggctg[292 bp omitted]gcctaagatgtactcaaattcctgggttcaagagatcatcctcctcagcctccagagtagctaggactataggcatcagccaccactccctgctaaatgaatttttctagcggcaagacctgggggacaattccttaatctctccaaagtttagttgtttatcagttaatacaaccctggtgtcacaagggctgttgtaaacattacatgagataatgcctgtatcactcttagcacagtg[143 bp omitted]tgaaaccccgtctctactaaacatacaaaaaattagctgggcatggtggcaggtgcctgtaatcccggctactcgggtggctgaggcaggagaattgcttgaacccgggaggcagaggttgcagtgagccgagatcgtaccactgcactccagcctgaatgacaagagtgaaactctgtctcaaaaaaaataataaaaagaaaaaaaaaaaagaaacagaacctaaaacattctttaaaactgggctgtttcgtgtcatcatgactcaatagtgctgttcctggcacacagctgcagatcctacaatacctctgcctgcaaattccatttttccagctagaggcgaaggcaaacaattccagccaacatcacctaacactgtgaacacagtaaggtccctttcttccctctcagccttggtggtgacgcctctctctgcccccactcccctaggcatgcagcgagctttgctctttggggaggctgagcagggggattgggatgcctgcagctgctggcagcagtgctagggagaggggccttgacctgtcctggcgtctttagtttctgggagcccactcctttctaacagggtttgcccactgagcacttgagaacttgtgccctggaaatagacaggactgggtttgaatcccagctccatgacttacattctgagtcatctctatctagtgacctgtgtaatgaatatttcctacctgtcttggttcaggctgctatagaaactaccatagactaagtggcttagaagcaacagtgttatttctcacagttctggaggcgagaagtctgagatcagggtgccagcagggtcaggctctgggcagggccctcttctgggttgcagcctgctgacctctgcttgtatcctccctcatatggcagaaagagggctggagagatctctgggtctctttgctaagggcactaatctcattcatgatggctttaccctcatcacctcatcacctccgaaaggccctacctcctaacaccatcacactgggggtttagagttcaacatatgaattttggggaaacacaaacattcagtctcttaacgcttgctggattaatgagataatgtacctgtagtacccagcacatacaaataactcaataaatacttcttttcctcttcctcctcattattatttattctgcatatctctatctgagcaaatactgggtttcttctcttcaactcctgttccagtaatctatatagatattctactttccagggttattttgcttagtatttaatgatattcccatcctatatccattttcttaagttcccattctagtacgaaaatgaagtgaatcccctttgttaataaattttaatgtcatttaaaaaaatacaggccaggcttggtggttcatgcctgtaatcccagcactttgcaaggcagaggcaggtgaattgcttgaggtcacgagttcgagaccagcctgagcaacatgatgaaaccctgtctctactaaaaatacaaaaattagctgggcatggttgcaggaacctgtaatcccagctactcaggaggctgagattggtggatcccttgagcccagggaggtcgaggctgcagtaagccatgattatgccactgcactccagcctgggcaacagaatgagaccctgtctcacacacacacaaataaaaataaattaaaaaacacctgttcactagcagatcttctccaaagctgactcccagttctgaagggtatcttttaacactaagtaaatggcgaggagattcaaatcacttggcccacttacaagtgaaagtgttttccaagatcatcccagtttcatttctccaggaagtggaaactgtgtcagctgagaagatcctagcactatttgggggtatccttgagatcttctagatggtcacgattaaccctaaagccagcatccactgttttcaaggcactgtgccctatcaaccaaacacagatcttaaggagtttcaaatgttacaggggagataagatatgtatataaagaaacaatatggaaagcagtaagtataaggcacatacagaaaaagtacaactgaagttcaagaaaagatttatttttgacttggaaagttgggaaaggccttgtggaaaaggtagtcctcatacttgggactggagagactggaggaaaaaattggatgtgaagaaataagtgtcaaaggaagggaaaattactacctgtatttaaaaaattttttgatggcaacagttttcacattatgaggaatgctacagaattcctcttgttttaggagaaatcatggatgggtcttttggttatgaaacgcaagccctagggaagagagggaaagtagaagtccagaggaagctgaattcctctggagaagccaataaatctgtgtctttcttgagacagagatgttgttgcaatgtcaaatgatatttgtgtccttcgggcaggcctcagaacagaagttcaggaggcttagaactcaaaggaggaaggaggcaatgaaattctatgaaaaagagaagttagcaaagggcaacatgttgtgggtcaagaagagcaggccagttaccaaattccccatggcaggagccaaccgacttcagcaatggcggtacctattaaacacttccgttatccaaaataggctgggcgcagcaactcacacctgtaatcccagcactttggggggccgaggggggcagatcacttgaggtcaggaatttgagaccagcctggccaacatggtgaaaccccgtctctaccacaaatacaaaaattagctggacgtggtggtgtgcacctgtaatcccagctactcgggaggctgaggtaggagagtcgcttgaacccaggagacagaggttgcagtgagctgagattgttccactgcactccagcctaggtgactgagcgagactccatctcagaaaaaaaaaaaaaaaaaaaaaaaaagactgatcaggtttctgttttcatgggcttacattctagtgagggaaacagaaagataaacagatgatagatagcaataattgcattgtaaagctttcaagtaggttgatataatagcactggtggctacttaagaccaggatggccaggaaaggcctctctgaagaagtggctcacacctgtaatcccagaacttttaccatttgaggtctgaatggtaatcagcagctaggtaagtaaagatctggaggaaagagcattctagggaaagatctcgaacagtacaaaggccccaaggctggaacaagcttggcttgttcaaagaacccaatggccaggtggctgcagcatgccatgggggaggctgggaacatgcactggaatgcgaggttgatttttacccatgaagcaaatgaaatgacattttgtaacatgtcaaccaaaaagctagaagccacagactcctgacttgaatatgaagggtaccttgtgttgaaatttttacatttatttattaagaaactgtaaaaatttcagattaaaaattaatagactatcagcaccataagacagggtgagggctgggcacagtggctcacgcctgtaatcccatcactctgggaggccaaggcaggcagatcccgaggtcaggagtttgaaaccagcctggccgacatgatgaaaccccatctctactaaaaatacaaaaattagccaggcgtggtactgtgtgcctgtaatcccagctacttgggaggctgagggaggagaatcacttgaacccaggaggcggaggttgcagtgagctgagatcgtgccacggtactccagcctgagagacagagtgagactccatctcaaaaaacaaacaaacaaaaaaacaaaaaacaagacagggtgaaaaaaatcagtagaatataaaacaaaagtgatgaagatatgtgattaaaacaaaagtgatgaagatatgtgattagtacatactccaacatcaagaaaagaattaacaacaaaaagttcagattctacagaaagtactagtgttaagaggaagagacaacacttgaatagaggtaataaataagcttctagcttgctggataataccattaatgaagataagggaaagataggaacccctaagaaaaagattttgagttcttgctgatttaacacaaaatattgacatcagtaaaagtcacataacactgaggattcaccactaaaacaaggacttcaacaaccaactcataatggttattgtcaaatcaaagaatacttaagattaatcttaacaagaaaacatgaaatgccctaaaatcttacagctcatttgggatagaaaattgatagaggttttaacaacagtcctaaaattttacataataatgaatcatgtagttgaaagacactcttttaaaatatcataaaaaccaaatttcagccgggtgtggtggctcacgcctgtaatcccaacactttgggaggctgaggcaggcagatcacttgaggtcaggaagttcgagaccagcctgaccaacatggagaaaccccatctctactaaaaatacaaaattagccgggcatggtggcgcatgcctgtagtcccagctactcgggaggctgaggcaggagaatagcttgaacctgggaggcggaggttgcagtgagccaagatcgcgtcattgtactccagcctgggcaacaagagtgaaactccgtctcaaaaaacaaacaaacaaacaaacaaacaaacaaacaaatttcaagcaaccatgctggaggacagagaattatctttctaccctttccttagaaaatgaaattaaaaatgatatttaggctgggcatggtgactcatgcctgccatcccagcaccttgggaggccgaggcgggaggattgcttgagcccagaagtttgagaccagcttgggtaacctagtgagacctcgtctctactaaaaataaaatgaaataaactagctgggtgtggtggcacacacctgtagtcccagctactcaagaggctgagacaggaggatcacttgagcccaggagtttgaggttgcagtaagctatgaaaaaacaaaaaaaagatattttaaattgtcatatgaagagacaaagactagtgaaaaaatgtagcaaaaagtattttagttgtgttaataagttaattcataaaaaatatattttgggctgtgtgcagtggctcacacctgtaatcccatcactttggtaggctgaggtgggaggattgcttgagcccaggagtacaagaccagcctgggcatcagagtgagaccctgtttcattttaaaaaattacatacttatatatgtagtaataaatatataatatagtaataaatatataattatggttattttcctaaacttggtgatattttttgcaagtttttgaaaatttgaaatttattgtggtttcttcttggattctaaacaaatattcattttctttcttttcttttttttttttgagacagggtctagctctgttgcccaggctgggatgcagtggcacaatcatagctcactacagcctggatctcccaagctcaagggatccccctgcctcagcctccccagttgctgggactacagggacatactactatactcaactaatttatttgctttttatttgagacagggtctccctgcattgcccaggctggtctcgaactcctaggcttaagcaattttcccacctcagcctcccaaagtgccagaattacaggcgtgagccactgtgcccagctaaatattcattttcaattt[133 bp omitted]ctactaaaaatataaaaattagctgggtatggtggtgtgtacctgtaatcccagctacttgggaggctgaggcagaagaatcgcttaagcctgggaggcggaggttgcaataagctgagatcgtgtcactgcactccagcctgggcaacagagttagactctgtctcaaaaaaaaaaaaattaattaaaaataaataaaaataaaagtaacaatatttgtgattttatattttttttcgtaaagaggctcctccctctttacgaaattgtgtaagttccaggacccacaaaacctaaatctttccctaggtacaagaagatatacagtttgctgctaaagaagggatttggattttattctatgtatgacgggaagctattaaaaggttctgattagacgaatgacgagctgattcatgacattttaaaaagatggctctggctgccgggttagttagtgggggagatggagggggaggctgtgtccatgtttgtggtgacaaggagtggggggttcctaaagctgtgcaacagccagagtctctggagaaaaagccaggacaggtattcagagcaggaggaggtaagccccagaagtaagcattgggcacaggttagctatgatggtcatgatgaccacttaccattcagctaatatatactgaatgcttacttccggagaaggtgaaatagccctgggtgggttcagaaatattgaagaagagatcgagtttcctataggatgggggcttaagttagggaaactgatctgagaaggcttggggacttagggacacatgattggcaaggagagaataaaaagacacagagggagcgaacacaggacatgcaaaggtaaagggacaagtgagacattaggtgggctgaaacacaggacacaacagcagtaatagctaacacttccacagttcacctggtgccattactgggttttgcacatattaactattttattttattttattttattttattttattttattttattttattttgttttgttttgttttgttttattttgttttgctttgttttaatttttgagacagtttcgttctgttacccaggctggagtgcagtagtgcaatcttggctcaccgcaacctctgcctcctgggttcaagcgattctcctccctcagcctccccagtagctgggattacaggcatgcaccaccacacccaacacatttttgtatttttagtagagacagggtttcaccgtgttggcaggactgggctcgaacttctgatctcaaatgatccactcacctcagcctcccaaagtgatgggattacaggcgtgagccacagcgcccaacctaacccatttattttagaaagagaagctgcagtcagatcatggtctgctctaagttaagaaacacggacatattttatggatagtggggagccactcaaacaccactgaaggtttttgagcaggtattattaggaaataaaaaagagtaatcaagatcacttagctaggggggcctaaagacctcctgaaattttgagcaaatatttgtgtgaatgcttcttttcctggggagagttcatacctcccatccaacctcaaaggtgtctgagatttcaacaaaggctaaggaaggccgggtgtggtgactggagcctgtaatcccagcattttgggaggctgaggtgagtggattgtttgagttcacaagttcaaggccagcctgggcaatatggtgaaaccccatctctacaaaaaatataaaaattagccaggtgtggtagcattgtgcttgtagtcccagctacttggaaggctgagatgggaggatgagatgggaggatggcttgagcccgggaggcagaggttgcagtgagctgagattgcaccactgcactccagcctgggtgatggagccagactgtgtctcaagaaaaaaaaaaagttaaaaatcacggacttagtggtttcaagcctagatgaccaataggatggtagtaacatgaatgcaagtaggggtcacaggcaagacataaggaggtagggttggctggaagagcagagacatggtctcttccctctgagatatgttgatttcacagtgttatagatgggtctcgagtaggcagtagagacttggaacccagctctccagagatggggcgaggctgctgccacaggcaggggagtgatcctctatcacaagctcgagtttgaatgacattgtcaaggaaaatctgaaaagagggccaaggacagatctttgaacactatttgatctgactgccatgccttttcctaagtgctttctgacagattttttttttctacacgggaaattcacattttgaactttagttcctaaaatacattaaattatacttggcttctaagacgaggcaggaggggatgcacataatgactacttatgtggcttctcatctgaggaaattatctcttcaaaatgatcaggtgctcctgaccctgttcttaagagcgtgggcatttttgagctaattttggaagtgtgaaggataattgttagcactcagaggacctagttctagcccagtgttaaaatctcgggaactggctggtcacagtagctcaagcctgtaatcccagcactttgggaggctgagaaaaaggattgtttgagtccaggagttcaagatcaggctaggcaatatggcgaaacccaaaaatacaaaaattagctgggcatagtggtgcatgcttgtggtcccagctactagggaggctgaggtgtgtggatcacttgagcctgggatgcggaggttgcagtgagccaagattgcaccagtgcattccagcctggaagacagagcaagaccctgtgtcaaaaaaaaaaaaaaaaaaaaagctgggcatggtggcacacacctgtaattccagcactttgggaagctgaggcgggtggatcacctgaggtcaggagtttaagaccagaccagccaacatcgtgaaaccccatctctacttaaaaaaaaaaaaaaatacaaaaattagctggctgtggtggcgtgcacctgtaatcccagctacttgggaggctgaggcaggagaattgcttgaactcaggaggcggaggttgcagtgagccgagatcatgccattgcactccagcctgggtgacaagagtgaaactctgtctcaaaagaaaaaaaaaaaatcagaaatccacaaaatccatcccctccctggggaggaaagaaaagatacctacatgtggcaggaagctgcttcaagtattaaggtaggccaggcatggtggctaacgtctgtaatctcagcacgttgggaggc[133 bp omitted]tgaggcagaagacttgcttgaacatgggaggtggaggttgcagtgaaccaagattgtgcctctgcactccagcctgggtgacaaagtgaaactccctctcaaaaaaacaaaaaaagaaaaaaagaaaagaaagaaaccccatctctactaaaaatacaaaaattagctgggcgtggtggtgagcacctgtaatcccagctactcaggagcctaaggcaggagaatcgtttaaacctgggaggcaggggttgcagtgaaccaagatcgtgccactgtgctccagcctgggtgacagagtgagacactgtctcaaaaaaaaaaaaaaaattaaggtagattgcacattgatagctcctatcctgga[139 bp omitted]catggagaaactccgtctctactaaaaatacaaaattaaccaggtggtggcgcatgcctgtaatcccagctactcaggaggttgaggtaggagaatggcttgaaccggagaggtggaagttgtggtgagccaagattgtgccgttgcactctagcctgggcaacaagagctaaactgtctcaaaaaaaaaaaaagaaagaaaaaagaaagaaaaagatctcaaagaagtgccatcattttcctgagaggctgtttaattttgtgtgggtacattatttcaataagaaaagagcagctgttttagtctgtcatacccagaaactacctgatagccaatatcatgaaactctgcggaggcagtaaaatgctataagtggtcatgatgatcaccatggctaacatgtgctgaacacttactttggtttttggagacagagtcttgctctgtcgtccaggttggagtgcagtggtgcaatcatagctctctgtatcctcaaactcccgggctcaagcgagcctcctgagtaactgggactacaggcatgagccactacacccagctttgaatgcttactttgtaccaggccctgagttaaggccatatattggccgggcaggatagctcacacctgtaactccagcactttgggaagcagaggcatgtggattgagtcccagcgttcaagaccagcctgggcaacatggcgaaattccatttctacaaaaacaaacaaacaaataaacattagtcgagcgtggtggcacatgcctataatcccagctacttgggaggctgtgggagaattacttgagcccagaggttgtagtgagccaagatggtgccactgcactccagcctgggcgacagagtgagacctcatctccaaaaaataaataaatgaaacaaatttttaaaaaagaaaaaaaaggctatatattcattactcatttaatcctcacaaaaatcccatcagatgagttttgttaaaggtcttattttatggatgcagaaattgaggcttagtgagcaaagtttatgcttctaaccacccccagactgttcctgctttactctgggcaagactcatctgcagaccttcgtatggccatgtccagccttgtgggcccggatcatccatacaaggggcagtagaaataaagccaagagtaaacacccttagatccactaggctgcactctagccctgcccctgtgccatgctgcagcatgcttccacccagctctgaaccctgcccgtctggctctaaatacctgcttattgtccctacttccatgcacttcaaaccctgcacttcaaaccctgctggtttgccttagggtgcagctgggtttggccccaccacctgcaaaggttggggcagagctaaacaaacaaggac[133 bp omitted]gcctcctgagtagctgggattataggcacccgccaccatgctcagctaatttttgtatttttagtacagacggggtttcgccatgttggccaggctggtctcaaactcctgacttcaggtgatccacccgtcttggcctcacaaagtgctaggattacaggcatgagccactgtgccagccgaaggcaaggccagttctaagaggaacgtgctcaactcggaggaagtctcctatggctggcagaacaaatactggcagaaaagggatactgaaatgcctgcccagcagtgagggctggaactagatagaattagattgccaaagtggacaggtagagggccaggactagatgtcatagggcaaaaggcacaacgtagaatatcagaggctttctgataacaaggtagccctgggttgagaaattcaagaagggtcaatatttaagaaccaggatagatgtcatagggtagactttctcctctttttccccgttacgggttgaattgtgtcttccccaaattcttatgttgaagtcctaaggcgcagtacctcagaatgtgatctcatttgcaaacagggttgttacagatgtaagcagttaagatgacgtcattcaggtggctttaatcctatataatttgtgtacctataggaagggaaatttgggccaggcgcagggactcacacttgtaatcccagcactttgggaggccaaggaggatggattgcttgagccctagagtttgagaccagcctggccaacgtggtgaaaccctgactctaccaaaaatacaaaaattagccagtctcataaccctgtctcaaaataaatagaaatttctttaaaaaaaaaagggaaatttggaaacagaaatgcacacacagggaggatgttgtgtgaaaatgaaggcgagatcagggtgatggttctacatgctgaggaatgccaaagactgccagcaagccaccagaagcgaggggagaggcatggaaaaaattcgatctcacagctctcagaaggaaccaaccctgctgacaccttgaccttggacttctgacctctagaactgtgagacaatacgcttctgttgttgaagacacccagtttgtggtctggtcttgtctttttttttatttgagacagaatctcgcactgttgcccaggctggagtacagtggcatgatctcggctcactgcaacctccgcctcgtgggttcaagcaattctcccacctcagcctcctgagtagctgggattacaggcgcctgccaccacgcctggctaattttttgtatttttagtaaagacagggtttcactatgttggccaggctggtctcgaactcctgacttgtgatccgcccgcctcggcccctcaaagtgctgggattacaggtgtgagccaccacaccaggcccagtttgtggtattttcttacagcagccctagaaaataaatgcacctcttttctctaaaactctaggcctgttccagtctgcttctggccaatctagtcctggtttcctgaacccaggcttcagaagaggcagatctgcagagagcttttcaataaaaatggctccagcagagctcatgggtatgcagagctcattggaagttggcaggcagagtagcatggggaccttacactccaccttgcaggctgaagatactctgtgtcctatgttcaatgtggtttcagggagagggttctcaatgtagaactgggtacgtgctaactctcttgagggatgaaaatatttaacctggagcatggattttgcttaacatgactcataaaaatctttgttctcagcctctctccccatcaccattcaggctgttaccaacttgccttttatctgacaaaggcagccagtttccgtggttacctacaagcatacagcaaggtgccattcccaggagacccctggattaagcaaatagcaagacagggggcctctggcccaaggaaaataacctggatccaatgatcagagtgggatactgggggcaactggatttcaggagcaagttggaagcccagttattatagctgggcatggagccagaggcagagcagcaaacctagtactactgtctgctggacactgagcccttcctatgaagcaggtgctacagcaagcaactcatgtgccttacctcctttggtccttgcctacttaccaaagcactcagttttatagatggaggaactcatgtgacacgttgaagatcacatggccggtaggtaacaaggatttgaacccaggcgctgaataccttccatttatccctctagctgagcttgctgtccttctccaccccagaggctgaccttatgagctgcatcaacagcctccctttccccgctagcaccagttgggtctgttagtggagagccccacagacaagagggaagaaaggagagggtgcttttggcttgtggtgccacaaagtggttttctctatataatcttctccttctatttccttctctgtgtctttgaatctagggctgctactgctctatcccttgtggttgtccagtgcccactcttttggaggaagcctctttataataagtccttcttgacttatggtctttctggtaagactgactgctgtaccaggtctgtctactgctgaaggctttagcctgaactcccatgctactcttctctttgttttccagccagcgtggtgatttgagtcccagagcattggatcagtgcttttttttttttttttgagacagagtgttgctctgttgcccaggctggagtgcagtggcgcaatctcagctcactgcaacctccacctcctgggttcaagcgattctcctgcctcagcctcccaagtagctggaattacaggtgcatgccaccacgcccagctaatttttgtgtttttagtagagatagggtttcaccacgttgggcaggctggtctcgaacacctgacctcaggtgatctgcccacctcagcctcccaaagtgctggaattatgggtgtgagccaccatgcccagccggatcagtgctccttaaacgcctgcaatctaaggtcagcattggtctctgagacttggcactgtgggaaagaggtgctaagcctgaggtgggtactcagtggttacaagtgtgaggagagggcacggcagagtctggagagctaagcagggcctgacactcacctacaaggaccttccattcccacgtggtccttctgttctggcagctccccagtgctgagctgctgcactggagtttagctaactgttcagctggagggaaccgtccctgcaagcctgccttcacttcagacaccagccacaagtttgtgggtttgcaggaccaccctcacttcagactatatggctacaaactcagaggttttcaaaaccaccctcacagaatgattcacagaactcaggaagtgctatacttacggttacaattttattttattttattttttgagacggagtcttgtaccgttgcccaggctggagtgcagtggcacgatcttggctcactgcaagctccgcctcctgggttcaagccattctcctgcctcagcctcccgagtagctgggactacaggcgcctgccaccacgcctggctaattttttgtacttttagtagagacagggtttcattgtgttagccaggttggtctggatctcctgacctcgtgatccgcccgcctcggcctcccaaagtgctaggattacaggcgtgaggcaccacgcccggcctatggttacaattttattgtagcaaagaagataaactcaaatcagccaagggaagagatgcaagagcagatttcaaacgatatccacttgaggagcttctggtcatcatctctccatagaatcatggagtcttgaacatgatgtgtgataatatatagtacagatgccctttgacttacaatggaattacctctcaatgaaccaactgaaaatattgcaaatcgaaaatgcatttaatacacctaaactaccgaacatcacagctttgcctagcctaccttaattgtgttcagaatgcttatattagcctatatttgggcaaaatcatctaatgtaaggcctgttttgtaataaagtggtgaatatctcatgtgatttattgaatactgtatactgcatagaaattgtgacagttttgcatcatcataaagtcaaaaaatctaagtcaaaccatcctaagtcagagaccttctgtattgccaacatgagaaggtcacctaagcctttggtgttcagggtttttgtgggagttcagttacaacaaattttggtatctagtcctttccagaggtcagaactgatgtgacatgacccaaagccttcatcataaatcacactgttagactgctcaatggccaaagcctataggcaaacaaaaacagtcctatcagtcaggacattccaggggtctagagatcacctcctggtagccaaggacaacagccagacctctctttggggcaggttaattcttcattacacaacgactttgctcctttagcatctatcagaccttcccacttggcagtattcctagtgtttgtcttgcctggccagcacagtgctgttatcatccatgtgtccatcggagtgtgggatggagctcaggagacacttgattctgtctatggtgagcttaccagctcttacccattgcaagactcaccactgcaaccactatccctgctactgtggtggtaaatttcatgtctttattcca[133 bp omitted]ccaacatggagaaactctgtctctactaaaaacacaaaattagtcgggcgtggtggcatgtgcctgtaatcccagctactcgggaggctgaggcaggagaatcgcttgaacccgggaggcagaggttgcagtgagccaagatcgcaccattgcactccagcctgggcaataagagcaaaactccatctcaaaaaataaaagagtttgtctttggggcactaggggaagagtctacaatctcctaaatgcccttgcacaaatcaactgcctccctgctcttgtgctttggggccattattagtaaaataaaggttacctgaacacaagcactgtgatatgacagttgatctgataaccaataaccaagagggctactaagtgactttcagggcggggagcgtatcagcctggatatgctggacctagggatggttcatgtccccagtggggtagggcaggacagcacaagcttttatcattctactcagagtgacacagtttaaaacatttgatgcattatttctggaattttccatttaatattttcagaccccctgttgaccatgagtaactaaaatctgggaaaacaaaaccacgaataagtggggggactattgtctgtgcccggctcttgtcttaggcctcttgaaagccacagatgtgtcttagtcatctttgatacctccagtgcctaccacgagctggtccctcacagttattctgtaaaccgacttctctagttcacttgctcagcaatacactgcattgaatttctctagatgagaattagcagaggtgcctctgaatgcacactagcccagtctttaataacacatctttatttggaagagttattctgtttgcagatattacctcttctaatccttgcacctgtgagataggtgctcttactacccccatgaacagatgaaggaagaaattgaggcatctatagagagcaactttcccaaggtcatctaatccccaggtggcccagtggggacagaaccaggtctgttggattccagagctccaagtccttaaccactattctgtaatggcctggggtagtccagtgagatcaatgcaattataggtcatttccaggagaggatttagcttgaaatcatgcttagagttgagaatgcgattataaaatgaagtgactttgaataatctgtgaagaggtgaaatgaaagctagtgattatgactgagaatgcactagaagtagaaaaaaaaatgatcctggtttttaaggcagtaggaagccactgttaagtccatcaggtgaaaagagatcatcattaaatccacatgtaaaacacaagctgaaacatttgtgtgttgttttttctgatcttagagtaatctttactttgcagctctcttttttctacatttttcacattggac[131 bp omitted]ctgcagcctcgatctcctgggctcaattgatcctcctgccttggccttccaagtagctgggactacaggcatgcaccacacccaagtacatttttttttttttttgtcgagataagatttcgccatgccacccaggctggtcttgaactccttggctcaactgatccacccacctcagcttcccaaagtgctgggattataggtgtgaaccactgcacccaatcttcaggttaatttttttgtttgtttgtttgtttgtttgtttgtttgtttgttttgagacggagtctggctctgtcccccaggctggaatgcagtggcgcagtctcggctcgctgcaagctccgcctccggggttcatgccattctcctgcctcagcctcccgagtagctgggactacaggcgcccgccac[187 bp omitted]aggtttggggcaatgaggaactgcatatatgagggtggcctcatacgattataatgccatatttttactgcatcttttccatgtttagatatgtttagatacacaaacacttaccattatgttatgattgcctacagtattcagtacagtaacatgctgtacggatttgtaacccaggagcaataggctataccatatagcctatgtgtgtagtacactatagcatctaggtttgtgtaagtaaactttatgatgctcgcacaatgttgaaatcgcccagtgatacatttctcagaatgtctcccatcattaagcagtgcataactgtacacaatagtataaaagggtagcattgcctaaaatttctaattaaaaaaaatcaagctgggagcggtggctcacgcctgtaatcccagtactttgggaggccgaggcgggcggatcacgaggtcaggagatcgagaccatactggctaacacggtgaaaccccgtctctattaaaaatacaaaaaaattagccaggcatggcggcgtgctcctgtagtcccagctgctggggaggctgaggcaggagaatggcatgaacccgggaggcggacagtgcagtgagctgagattgcgccactgcactccagcttgggtgacaaagcaagaccccatctcaaaaaaaaaaaaaaaaagttccctgtctgatccctatatacttctactctcttgagacaatcacctcagctctcagctgttccttctaacatttataatcactttttaaataatatgtttttatttaacttcttagctgatagattttaggtataatctattgatttcccaccatcatagatgagggtttcccttttccatatcaccttttccacttccctttctcccaccttccctatgtaagcctattgacatctcatatctctttttctacctaagcatattgacattttatgttatatccaaagtcagtgtttatattattatggctgagcaaatattggtgacaaccaaatcagacagtattaaatagtattctattttcaaccacacctcctttcttgtatttaaatttttcctatattaaaaattgccatgttttttcacttgcctatttgcccacgaactcatccaatttttccccaagcatttcaatacctctgtcacttacatatcaaaatgtctcccaaatattcgcacatgtaatttccatagttttcctagaactcttccggaaacttcctttgttctgtctgggcagagtgctctcaacagctgcacacaactgacaatctgggaattcctagctttttgtttttatgtgtcattaaaatgtagaaaacaaaaccaaccaaaaaaaaaaaccacataccttctaaagtttgtttgtttgttttttgcaaagtaaatccctatttgattttttaaagtaatctactaactcactgtttcaactgtttcctcatcttcaagtttgttactcaaggatacagttagaacacaaaaagttgaatggcagcattaatgaggaaaattttctctttattaaacccttccatccaacaagtaaaaaaagaatgtttgaattaaacaccattttttttttttttttgagatggagtctctctctgtcacccaggctagagtgcagtggcacgatctcagctcactgcaacctcagcctccagggttcaagcaatcctcccgcttcagcctcccgagtagctgggattacaggcacccgccaccattcccagctagtttttgtatttttagtagagatggggtttcaccatgttgcccaagctgatctcgaactcctggcctcaggtgatccacctgcctgggtgtcccaaagtgctgggattataggcatgagccatcgtgcccagcctaaaataacaccattttgtaatttttttttttttgaaacagggtctcactgtaacccaggctggagtgtagtgacccgatcacggctcactgcagcctcaatttcctgggctcaagtgatcctcccgcctcagtctcctgagtaagctgggactacaggcatgcaccaccaagcctggctaatttttgtatttcttgaggagatggggtttccctatgttgcccaggctggtctcaaactcctgggctcaagtgatcctcccacgttggcctcccaaagtgctgggactacaggcgccactgcacctggcctgtataattataatttttttttttaagacagggtctcattgtgtcacccaggctggagtgcagtggtacaatcatggctcaatgcagcctcgacctactgggctcaagccatcctcccacctcagcctcttgagtagctgggagcacaggcccaccatgcccagctaatttttctgggtttttttctttctttctttctttctttttttttttttaatatttagagaccaggtctcactatgttacccaggctggtctcaaattcctgggctcaagtgatcctcccacctcagcctcccagaatattgggattacagacatgagtcactgcacccagccttaaagagactttaaagacacattgacaaattgcaatatgtggaccttattttgatcctgactcaaacaaatataaaattatgacatttgtggccgggtgcagtggctcacgcctgtaatcccagcattttgggaggccaaggtgggtggatcatgaggtgaggagatcgagaccatcctggctaacacggtgaaaccccatctctactaaaaatacagaaaattagccggttgtggtgacacacgcctgtagtcccagctacccgggaggctgaggcaggagaatggcgtgaacccgggaggcagaacttgca[132 bp omitted]attaagcaattcttgtttataattgatacaactattttaaaaatcctatcttttaaagatatgtactgaaataattacagataaataaatatgatgtattacctttacatcagaataatatgagagtttgagatggggcaagcaggtggaggtacagatgaaacaaagttcatcattattgaagctgagaaatggcacacaggggttcattataccattctttttgctttaatatatgtttgaaagtctccataataaaaagtttgaaaatgtaatctaaagatagttataccacaaactaaattaactcttctaaagcatgggctaactatgccaaaaaatgctcaacctggctgtggtggttttaggacaatggtccccaaattctttgacactcatcccattaagcagggggctctatgtcctctgcttttgaatctggatgcgcttatgattgctctgcctaatccagtacagaggaagtgctgatgtgtgacttctgaggctgggtcattaaaggtgctgcagcttcctcctggttttcttgggacccttgtcctgtgggaagttagccaccatgtaagaagtctgacaaccttgagaccacctgctagagaagccattgtgtatgcaatccaggagatagttcaagctaagctcccagccaactgcctgcatcaactagctgccagccaatgcagggagccatcttggatgtgcagcccaatcttgtcttcaagcaactgcagctccagccagcatctgactgcagccacctgagagatcccaagaccaaactgcccatcagtgctcttcccagtttcctgaccgtcaaaatcatgagcaaaataaaatggttttgtttggcttggcatggcgactgactcctgtaatcccagcactttgggaggtcaaggtgggaggatcacttgacttcaggagtgtgagaccagcttgcacaacatagtgagacttcatctctacaaaaaattaaaaattagctgtatgtatgttgtggcatgcacctgtagtcctggctactcaggaggccgaggcaggaggattgctagagaccaggaggttgagcctgcactgagccatgatcaggccactgcactccagcctggggaaacagcgagactccgtctcaaaaaaaaaaaagccacacacacacacacaaaacaaaaacagttttcttttacaccactacgttttggggtagttttttatgcagcaatagtaactgaaaccatgatcaactataagaaccaaaattaaggatatacagaacaataaaattgcttttcacttttctaaagcattaacattgtgactgcaaatgtcattaatctctctggatatttatattctcactcataagttgaggtgtggaaagagacttaagtcacttctatttttttttccattttttataaagatagggtctccatatgttgcccagtctgatctccaagtcctggcctcaagtgatccttccaccttggcctcctgaagctctgggattacaagtgtgagccattgtgcattgccaagacttttctaatcaataacaacaagtaggcaaatgtttatcttattcacctaggttttcacttacatgcaaacttttatttaaacatttcttatttattaataactaataaacttattcattctttcaacatatatttgacccaggcactattgctagttgccaggcactgttcttagattgtttaagggcactcatttatccaaatttaggcatggtataaccacagtagggcacctgactttctaattgctccttcttccaaccctcttcgtgcttttgcaggcttaatagagtcagcactaggacactcttttcatgatttttcatcttttcagaagagatctttttcttcagtaactaccatatatgatactgaactctgctcatttgagcatataaatattgaggaaactggcattacattccaggtagttccatggcaaaactgcttcaagacaaataaaatgtattattctacacaatactgtttgggactcttagggtacatttctggactggcattttggagtttgggctttcttttcagaatggaaatgagaagatctaaatcaaacgaagtgtaatgtcttctttgctaggcgatactgtgagaatacgggcctaagaaagactaattcaaattttaaggaaatgtccccggtgaacctgggctccagttcaaaaatgtttttttgcctgacatggttttatttaaaaaaaaaacacaattttacaatatttatcctatgaatgtgtgtgtgtgtattttttccaatataaaacacatctacgaaaacaaaacaaaataaataaataaataaacatatctacgctatttaagtcaaccaatatggttagtttgcttcctctgatagttttctaaggcagtgaaataaataaaaaatcaaatttgttctaaagaaattagtactatccaggtgcggtagtgcacacctatagtcccaggtacttgggaggctggggcgggaggatcccttgagcctaggagttcgagattacagtgagctatgattgggccaccacactccagcctaggcaacagagcaagatcatgtctttaaaatatatatagtactttactaagaactaggttaggaattagaaggaggggccaggggctcatgcctgtaatcccaacactttgggaggttgaggcaggtggattacttgagatcaggagttccagaccagcctggccaacatggtaaaaccccgcctctactagaaaaatacaaaaattagctgggtgtggtggcaggcgcctgtaatcccagtttgggaggctgaggcaggagaattgcttgaacccgggaggctgaggttgtagtgggccgagattgcaccactgcactgcagcctgagcaacagagcgagaccccgtttcaaaaaacaacaacaaaaggaattagaaaacttcagccgggcatggtggctcacgcctgtaattccagcactttgggaggtgcaggcgggcagatcacaaggtcgagagattgagaccatcctggccaacatgctgaaaccccgtctctacaaaaaatacaaaaattagcagacatggtggcgcgtgcctatagtcttagctacttgggaggctgagtagctgggagaagcgcttgaacccgggaggtggaggttgcagtgagccgagattgtgccactgtactccagcctggcgacagagtgagactccatctcagaaaaaaaaaaaaaaaaaaagaacttcatctccttctggagttcatattatcttcagtatgtttatcagttacagcacttagtgtctcccaaatctacatcttctgcccatgctaccccctagctgagccccagacttgcatattcaacaaccaacttggtatttctgtttggttaccagctataaaaactaattctagctatctaagaaaaaggaaatttattggaaagccgtgagggcctcaaagagtaataggaatgggagaggttaaggaggccgaagaagacagaaagtgacctggcgcttccagaatgtcttggtaataggagctgatcacccactgctcaaccgtatggtttcttccatctctgtgtcactccaaacaagattcaaagtcctggagggagtttggctggccaagcttgggttacatggcaactctttgactgaatcagtgtagccagactggcaaagataatgtttactgagacccattgttgaggcagatgtgtgtaaataggtgctcccatgcaccactgttgcaagtaaattgctcctgcttcttctgggagtcaattaggtaacataccaaatctttttcttttcctttcttccttccttccttccttccttccttccttccttccttccttcctttcttcctttccttctttctttctttctttcatacgctttaaccaagaaacacatttaagactttttctaaggaaaataattgattgagtgagcaaaaataaagatagttggttattttattattgtttacaatagcaaaattggagatgtcctaattgccaacaataggaaatttgttaaatgaatgatgatataaccatatgttgaagtgctttatagccattagaaattatgttgtagactcacatttgtttacatggaaacatgtccattttatattgttaaatgaaaaaggcaggctataaacagtatttgaccctagttttaaaaaattaatatacatatgtaatttttttttttttgagatggagtctcactctgttgcccaggctggagtgcagcggtggcacgatctcagctcactgcaacttccgcctccctccaggttcaagcaattctcctgcgtaatttttatatctttttagtaaagacgggtttcaccttgttggccaggctcgtcttgaactactgacctcaagtgatctgcccacctcagcctcccgaagtgctgggattacaggtgtgagccaccgcgcccagcctgtaattcttttccttaagagacagagtctctcactctgccacccaggatggagtgcagtggtgcaatcatggctcactgcagcctcaaactcttgggttcaatcaatcctccagcttcagtcttctaagtagctaggactacaggcacctgccaccacaactgcctaattttttttcttttggtagagacgaggtcttgctatgttgtccaggctggtcttgaacttcttgaacttctgggctcaagcgatccttctgccttgacctcccaaagcattgggatgacagacaagagccaccacactcagcatatatattgtatgcattttttttttttgggaggaggggaggacagggtctcgctttgtcacccaggctggagtgcagcagtgcgatcttggctcactatagcctcaacttcctggactcaagcaatcctctccctcaaatccccaagtacctgggaccaaagcatgcataattacaccaggctaatttttgtatcttttgtagagacagggtttcgccatgctgccaggctgggctcaaactcctggactaaagcaatctgcctgccctggcctcccaaagtgctgagattacaagtgtgagccacagtgcctgacctatatatgtatttttaaagttcaaaagaactgaaatctttggcaagcaagtgcgttttcacttctaaaatcagaaaaagccaggcaagatggtttatacctgtcatcccagcacttctggaagctgaggagggagaattgctggaggccaggatttcaagaccagcctggacaacatagcgaaaccccatctctacaaaaaatcagccaggcatggtggcatatgcctgcagtacaaggcagaaggatcgcttgagcccaggagttcaaggcttcaatgagctatgatcatgccactgcactccagccctggcaacagagcaagaccgtgctctctaaaacataaataaataagtaaattaataaatgaacaataaaataaaatcagaaaatcaaaaactatttagagtgttaacaaagtagactcgatattacttaaatgtgcttgaaattcttttaatatagattattttcataaaatggtatatatcacatttttttaaactcttctatagacctggtgattagaagtatggtatctcacttttaactttacaatacagcctgtgagctttattttttgttttattttatttttttttgagacagaatctcgctctgtcacccaggctggagtacagtggtgtgatctcagctcattgcaagctctgcctcccgggttcacgccattctcctgcctcagcctcccaagtagctgggattacaggcaggtgccaccacacctgacacattttttgtatttttagtagagatggggtttc[142 bp omitted]ttaacatttatggactgccaggcactgttttagaagctttctatgcatttctcatccagtgctcaccacaaccttattaggttgataccgcataattatttgccctatttcacaaatgaggaaactaaggccacctatcaagtcactggaaagtccaggactccccacaaactagagttaagtccagagcctatgcttttaatctctgtgctagatttcctccataattaggaaattaagtttgagtgagttcatttatttataccattgccttgttccagaaaggatttcaggcaactggttaagtaaattgtccaagatcacccagacaataagtggcagtgccaagaatcaaaactctttcttgaaggaactgtataaactaagtgagctaacacagatgtagactcacatcttgtatttcctcctaaacatgagaaggggaaatgaagggtctttctttggccagttttcatgttcattctagctggatgtgttttcagccttagagcgcctttatcatttgaaaagggacagagtaggacaagaggaattcatgaatcgcaggactgggcagcaagcacatggctgcccatggtaggcagaggaaaggaaaggcctgaggcgatcctaagatgtgtgcttgggacgtgacagacaacctggaaacactgcttagtaataagccgccttcaggaggaaaggtaagaaagagcaaagaagggtaaaatgaagagaccgaggaagagctagggagctatatagtatgagaggtggagggaaggtaatgggggacatgtatagctgtccgggagtgagaataaaaataacaattggccaaggtgggaggatcacttgaggtcaggagttcaagaccagcctgggcaacatagtgagacgcccccgcaacgtctctacaaaaaacataaaaatgagcagagtatggtggtgcatgcttattgtcccagttacttgagaggctgaggtggaaggatcacttgagcccaggaggtcaaggctgcagccagccttgatcacgccactggactccagcctgggcgacagagcaagaccctgtcactaaaaaaataataataaaaataggccggcatggtggctcacgccagtaatctcagcagtttggccaacatggtgaaaccccatctctactaaaaataaaaaaattagccaggcgtggtggcggggcacctgtaatcccaactactggggaggctgagacaggagaatggcctgaacccaggaggaagaggttgcagtgagtcgagagcacaccattgcactccagcctggtcgaaaagagcaaaactccgtctcaaaaaaaaaataataataataatagtaattggatttgagagtgccaggtttcaaagaaggaaagtgtaaaaggtaaacactaacagaatattcttttttttaaaaaagtacatattctaaagatattctaaagtatctcaaatcaaggacagccccttcaagtctgagtgagtaacatttttgctattccctctcagtcccctctttgtttggggtccatagcatccttcttctcgagacaagtactgagtcaattttcttttacctctaagaactcagtccaaataggtttgtgtaaagaactgtcttttcttggcaataacttgaaaaataaataagatgaaatatacactcgttcttttttgtatggctgaaaaacggaacatccatttgctttcagtttgaattgttacaaaaacattgcagaacttgtcctaatttttttttttttttttttaaatgaaggagcctgtctcaatttagtatccttaaccaaacatgatttagtcccagggcaagaactggctataaagaaaatacagctattttagtaacagctctttagtcctggctgttcatggaaagctaactatgaaggcatttgaaacttctcattaagaaccatgatgttggccgggtgaggtggctcacgcctgtaatcccagtactttgggaggc[134 bp omitted]gaggcaggagaatcgcttgaacccaggaggcggagattgcagtgagccgagatctcgccattgcaatccaggctggtgacagagcaaggctccatctcaaaaaaaaaaaaaaaaacaaacaaaccaaaaaaaaaaccacgaagtttgatttaaattggacttggtcactctggataatgtaaaacagaagtcacttactgagacgtagggacaggaagaggaaatggttgatctagggacaggaagaggaaatggctgacctgtaactagagttctccaaaggtgacaggtagacttattaacctcccgggacctatatttatgtagcaacttgagctgaccagcacgtgtgctgggtaatgtttaaatcattagagtgcatgtatacgaacttaacattacaggaatttatttcctctcccattactgctttctggatatttctttttttttttttttttttttttgcctaaactatgcaaacaacattcaaaaaaaggcagctcaatacaggttggttggatagaattctgtggaatattgatcattaggacttctcctttaccatgagaagtatacaaagagttctctattgtaagtaactgaatcttgggcaaagaaatgtccacatctatttgaatttagtttggagttattccttctctctacaaacagggtataatgtatatatttatttaaaaatatatgtattatatttttaaatgtaagtgatttaatcttgttttaaggatttaaaaaatcctctgagataattaaaggagttgcaaattccacaaagttagacagcaaaaccatgatgttc[141 bp omitted]taaaaccccgtctctattaaaaatacaaaaattagctgggcatggtggcataagcctgtagtcccaggtactcaggaggctgagacaggggaattgcttgcacctgggaggctgaggttgcagtgagccgagatcgcaccactgcactccaacctgggtgacagagcaagtccctgtctcagaaaaaaaaaaaaaaagaaaagaaaagaaaaaagaaaatgtatattatgatagccagtgactaaaaacctaacctaaactaaatttaatccctcattggctacttcataaaacctcaggtccagtacaaacagccctaacacaaatgcaacaggggcacaatgcagtattagacttaaacgcccagtaaaatgatttgagacctagcagatctgtgccctgatactattttttaaattatgactgataagaaactctaagaaacgctgaaagaaaaatgactcattccacaaagacatttttatgagggaagtggatttagaatttaatggtgacgtttagtcattataaagtagacaatttcatgaagaataatatgatatttataacagcatcattgtcaattaaattagtaaagagtaaaagtgaatcaaagatccttgatgggcaaagtatgatgaagtggaagctcagtaaagggacagttagctgttaggagagaagaaataggctgggcacggtggctaaagcctgtaatcccagcacttcgggaggtcgag[133 bp omitted]gaggcaggagaatggcgtgaacccgggaggcggaggttgcagtgagccaagatcgtgccattgcactccagcctgggcaacaacagtgaaactccatctcaaaaaaaaaaaaaaaaaagagagagagagaagaaatagagtggaagattttaattgttgtagttgtttttagatccatgggtttttagatctggtacttgtttttagattgttaggtctgcatcataacagaatcagacttggattagttaagttacacataaagttctgattcctcatggccaaatcttcttgcacatttcattgtctccattttttctctttggattgctcatctaatgcactagtttctcttctgcaagacttccttaagattttgttttgttacaatttttggttggtggcccatcctgaaagacagttgtttactacattctaaaaaagccacaaacaaggagtgtctccattggttacacattctagtctattcaaatcatggaccaacttatttttctgttgtttgtagtctgtagcctaatatactctgtactaccttctgaggacaatatgggttttgtaaatggcagaaacatatgtaactaatcaaactccattgtataatatattgtgccaagaatggattgtttcatacatggtgtgttggtgaagaaataaaaccttgaaagtaaagtgttttctattaggctacttaatatagaaatggtttatgcccgagggcaaaaaattcattgatgcttagacataatctattgacttttaattaaaaccttgcttattttacaagtgtaaatccatgagctaaatcacattttgagtctacggatttatgactggaataagtttaatgctgaattagcccttgtaaaatgtgctttcttagaataatagcattagctccaaaatacatgttatttgattgccttattgcacccaaaataaagttattgcaatttgtcaataccataaaccacatatcttaattaaaaatagcacatattatacataaagtatgttcaacaattgttcctaagatcctagcatctggaaatgcattcacagtatcatctgtacaatgaacaagtatttcatttttcagaccaaaaaggtaaaactttaaccctaatttttaagtctatgacttacagaaactgcagtatattgttataaggcttattatctttgaaaatgtctgctttgaatttttatttattccttgggttttgtagcttgataaaacacaaatggcaaatatatttatctaaaaatttaaaaatgtttttctcctgactcttctaactccctagttagaattttagaagatcaaacggaaagtaagcaataagtactaatttattataggataaaagaacataatccctgactcatttgcttctaattaagacgtgcatgagaccataaaaatagaaatatgtttatgtaactcatttaaaatctaaccaatccagagaaaacatcaacctcccctaagtgtatcaatacacagttttgtaatataacagaaaaaaatgtggccagaaaaatgagatccaatggcaatttccttttcttacaatagttttttcctatcaaatacagctaagaagcccttgcataagaactaaaacacaagaagttatcatctacagatggtggtttgcccctacgtattatgggaaaaatgatgaacacactatgcagagacattcatgtgttcattcacccacaaagacgtagtcagcaaccaggtcatgccaagcactgggctcagtccatccaagtgccaaatgcctaacagaacagggtgaattatcaagtctgtctgcagtgaaattacgtgtatctgcagattatctttcattttcactccatcgttttattgaaattcctatttttagatattttctcccatactaaaggctgaatataactttttagaaaaagactaattttagatcttccaccatgtaggctcagtttgaagtgttctttttcacattgccctaagtgaattatcctacgttttcagttccgaggctgtcagcctggatctaagccctgtttaagtcactgtcggttgaaagggttagtaagacatctgtgaatgttaaaagcatgtgggccagtgtattgctttgatcaggggtttttgcccaactaagaggactgaattttgactgaattcaaaatcatagatcatttggtggcaattaatacactactcttctttctaggatatttgcctatgtacctgtccatcaatgttaatctctctttggctaaaaatttagatttttcatagcttttttatttttgtagcaattcccttccccttgcaatagtctctgtttgttagtattattcatattatactttctaaatgtgtttctctttttttaacttacagtcagatccatattttagctgcttgattgtaattttctgacaccagtgaaataggattctccagtattaaaccaagatgtctccagggtaatagagcagagaagtggtaggatatgatagatgaggctctgagccacttgaagtattatgtggaaggtgaccaggaatattcaaaagcactatagagtttcaaggaagggtactctttgaatgaacatatattgaagaaataaaatgcatgtagaacagagcaaagcataatatctttttaaaatatattcatatttgattgtatatgcataaataaacactgaagaatagaccaaaaatattagagttgttacccatggaggaaagaggggcaaaggaatgaatggaaactatttgtgtataccttcctatttagttttgatttttgaatcatgaaacacacagttaaactaaaataaaaattacttggaagatcaggatcttcaatcagtagactgagatccatagagctatctctagacctttcctggtagaccctcatgccaattgctcccaccagctccatgaattctcaacccactgaatcctcccctcctcaagcaccgcattttcctgcaagctccacgtgcatctgatgcaggtgtcagaaaactcaaccccagctgatttaagcaaagaaagggaattgattgaggtaaactgaaaagtccaggcctagaccttcaggcacagcttgactcaggaattaaactagagaacacaaggatccagtccacagctctgcttcctcagagttggttctgttctcagaccctgccagtggtcaccagcagctacgggctatcaacatcacgacaaccaattatggaagaaagatccacttttcctctaatagcttccataaaagttccagaattgagtcttacgggctttgattggcccagttttaatcctttgcccatctcatcaatcactgtcgccaaagagggcatgccatcattggcttagtctaggttacatgccccactgtgggcataggagtgaagtgcttcatctgaagtgcataggtagaaaagtgaaactggggtatattatcaggaagggatgttagatattggacagtaaaaacactactcttggcagggcatggtggctcacgcctgtaatcccagcactttcggaggccaaggctggtggatcacctgaggtcaggagtctgagaccaccctggccaacatggcaaaaccccatctctactaaaaatgcaaaaattagtcaggcgtggtgactggtgcctgtaatcccagctactcaggaggctgaggcaggagaatcacttgaacccaggaggcggaggttgcagtgagccgagattgcagccactacactccagcctgggcgatagagtgagactccgttgcaaaaacaaacaaacaaacaaacaaaaaaacaccaaaaaaacactactgtgttctcaagctggagtgcaatggcaccatcttggctcactgcaacctttgcatcccgggctcaaatgatcctcctgcctcagcctcccaagtagctgggactataggcatgagccaccatgcctggctaatttttggattatttgtagagatggggtttcaccatgttggccaggctggtctcgaacccctagactcaagtaatccacccgcctcagcctctcaaagtgctgggattacagtcgtgagccactgtgcctgacctaaaaaagcagcttttcaaaagagatttgagactcctgatttaaaataagagtttttttggcctgaaataggctatccagagaacactgtacttttcaaagcaggtcagaaaaattgctgttctaatcaagaaaaagcagaagttcaaaaaaattacttatattcccaaaactgaattttaggagccagggaatgatgagcagtttgatagaactgttttgttgagttagaccagacaataaattatttttgtgtgtttttttttttttttggtataacacctcggtattatttggaccttgaaactttcttttaatatatattgtttctgatcgacgaccataggcagtctttaaatactccacaaggaatagatggaaaggaggcacctttccaagagaaatccttaaaccaaagtattccttacccgtttctgccctgttattccatggctggtctcaattagctttctgccactgtcatacatttgtgaaaatggcaacagtggtaatgaacatacccatgggcccatggaagatttccattttctcttcatttctggcaccacaagaacactccagtccagcacacacaatcagttcaagtgcatgcataaaactctactatatatagtatgagtggattccaggatgcaaactatatatagctgagctaaataacgagttcgctctcatgttactcagctggcaatgtttgaaacatgaaacagttctttccagtcactccttgttgaatgctggttctcactggtgctcttttgtgcacccttgttttcagctggcctgtctt[134 bp omitted]cctcgcctcccgggttcaagcgattctcctgcctcagcctcctgagtagctgggattacaggtgcatgccaccacacctggctatttttttttttttttttttttttagtagagatagggttt[144 bp omitted]ctttatttttatttttatgtttttaaccgtatccctggtggtaggtgaggctatggtatttttagccggaaaagctcagggcagcaatctgggggcaatcggggcagcaaaatgggggaagcttgaggcaattccctggaatctttttagatctggaggatgctgatggagattacagaggaggaagggctaaaagacccaccgtaggctatcttttggtgctgtcactacccacacatcttttttcttttatcttgtagaaactgcttgttctggcaggctctcacccagccaattaagccacgctcacccaatagaaaatctcaaaattttctctgaacttcccatttccatcagaagggcattaaagtgtcccacagacatttatttggtcatggggatgccaacatgaacaagatggtccttgtcctcaagttgttcacagtctaaagtgaagtagagccaggtacagtggctcacggtaatcccaacattttgggaggctgagatgggaggatcacttgaggccaggcatttgagaccagcctgggcaacatagtgagaccccatctcaacaaaaaatttaaaaactagtcaggcatggtggtgcacgttggaagtcccagctacttgggaggccaaggcaggaggatcctttgagcccaggggtttgaggctgcagtgagctatgatcatgtcattgcactcaagcctggttggcagagtgagaccttgtctctattaaaagaataataataataaagtagagtaggggtaaagggacatacacagacagacaagctatatgcatgagctgtatttgcaatgagtggtgtgttgtaaaaatcacagtgtgtgtgttctgtttacctcgtctgtgctccctatttgtatctcctctctctcatctatagcagctcgtattttattctttcccacattccattcattacacaaatacttgttgagtcttgagtctgtgctaagtgctgaggctacagtggcattggacttgtattccaatggagagaatcagataataagcaagtatacaaataagatattatttagtgaaagagaaaacagacgaagggatagaaagtgaccattaggggaggtaaagtggggaaaggttgcaacaacgggcacagcaatctctctgaggaggtgacatttgaactaagatctgatgggcaggtaagaggtaaccaagcatgggaatatctggggaagagcagggctggcaggtgaaactggaaggggcagactgagcaggaagtctgtggtattgcaggaatggaaagaaggtccaggtgactagagcttagtgtcacaggggagagggacagcagctgagatcacagaggtcatcagaggccaatcaggagggctggaagtccttgataaggtgtctgaattttattatcagtgcaatttggagaggggaatgtacttttcctatgatcagatatgcgtgttttttattcagggtatcctttttagcatataaagaaacagaattagtgatgaaaatattgattgcttggtgagtacagaattagagcaaagacagatgaaaggtcttgagggatattttaataggctctccaagggtccacagcactggggattttccttttcaaatatctggatatttgtgtgcatcagatatactaaactctcttgaacaaagtttaactcctcaagtctccttgtttttagggtaggcaggaatccatgcccttttgtctgtattctttatcacaccatcacctttccttacttccacagcctttgttacattccc[138 bp omitted]atggtgaaaccccatctctatttaaaaataataataataaaaaaagctggtcatggtggcacacgcctgtagtcccagctactcgggaggctgaggtaggagaatctcttgaacccgggaggcagaggttgcagtgagccaagatcaccccactgcactccagcctgagcaatagagcgagattctgtctcaaaaaaaaaaaaaaagagagaaaaaaaaagaatgtagtctaaaactatcataaactggatcctgatgggaagtgtacaattatataacatcctatccatggttagtgaataattttcagcttctatcttggggaacgagacctacgtcccacttcccaccgacttgggcttttggcttgggggctagccttcttttcacttcttgtcactctgtaatcactgaccacaatatgcatatggttctgatgtaaactaaaatctttatccaaaggctctatccacctggcaacttttgaacccatatgaaataagcagggtagtgactcttcttttgagacctcatttgctcatttattcaagtacatggagc[224 bp omitted]gaggcaggagaatggcgtgaacccgggaagcggagcttgcagtgagccgagattgcgccactgcagtctgcagtccggcctgggcgacagagcgagactccgtctcaaaaaaaaaaaaaaaaaaaaaaaaaaaaaacagatgcatgatgtactcctggccccctagtctgacaaagcttttatgtgtatctctggttcttaaaaagaacaaattgtccacttacaaactgtatacttacaactaacctggatgtacagggcgtgtgctccatgcagcttgcaaatatctgtcttgaattattttctgcagactaacagccaccatagcttctggttgctcctctctcctccttgtcctccttcccacctctagagcgcttgctgctgttgccatgacaaccagaaggaaaagctttggaactttatctcttactatgggcccatgtctccccatgaggacaatattgtctgtcactccaactggactctggggctttctctttaaatataccgttaagtcatgttaaaattggaactctaagggcaagattatgagggtattaagtcagggacctaggaattctcaaatcttgtttttgactagcaatccttttcttcaaagaaaatatgtgcacttatgacaaagcagggtatagggatgctttttactaagtggggcttcacatctaagccccatatagagttttaacaggtccatacaggcctggtggaggtctcttttggcataagctgggttgacccgagatgcctacttgaccactaagagattagaaaaaagatcctccagctcaaacttgtcatctgggctccaggttcaggcagcgatctaccggcttgatatttcccctggatgtctcgtggacatcttcatcttaaaaatctttccatccttattcttcccctagtcttccacctctccataaacagcttcaccctgcagaccgaggcccaagccagcaacctgggaggcttccttgactcttcccttccccttgcctccccgcatgcccaatccttaccaagtcctgtggctctatctccaaaataaaactcgcagacgtctgcttttctccatcaccactcctatcacttcagactaaaacgtagtcatcttccgtctggattattttaatcgccctcggactgttctccctgattctacttgtttctccccaagtccttcttcatagagcagcaagtgcgatcttttagaaagataaaccagattgcatgactcggctctttaaaactcttcttggcttcccactacacttggaataaaaaccgtcatcttcaccctggcctacagggcctgccctacattctctgagctcctgtccagcctcgtctctcccactctccacctggcccttcctccagtcgcatttgtcttccttccactctccatgtggcttgcaaatatgtctttaatttcctccaaagtcaaacagttgccatacatcctggttttcccacaaagctcttttcccacctccaagcctttacactttcagctccttctgcctggaacacatgttccctgccctttgcctgatctttgcacggtggctgtttccttttcaaccttgaggtctcagttaactgtcacctcctcagagaggccttccctgaccaccctatccaaaactgctctcccccatgagtgactctatcagtgcaccctgtttatttcctacgtaagattttccaaaacatgtacctattttggttattcatgtgtgtgtttattgttgagggcaggaactagacctactttattcattatgaatggcttataagaggaacatgattaatacctgttagatccatgaattatcatgtctgaaattccaccagggattcctacactcaggaaagaaacatgaaatatttttttcctcttcttcccccttcactctcttggtcagggtctttttttgttttgttttgttttgttttgttttgtttctttttttagatggagtctcactctgtcacccaggctggagtgcagtggtgccacctcgtctcactgcaacctccgcctcccaggttcaagtgattctcctgccacagcttcccgagtagctgggattacaggcctaaaccaccacactcagctaatttctgtatttttaatagagtcggggtttcaccatgttggccaggctggtctcaaactcctgatctcaggtgatccacccatctcagcttcccaaagtgctggaattataggcgtgagccactgcgcccagctggtcaggatcttgatgaatgaaattctccttagatggtacaaatgaagaaactgtaatgaagagattattctctgaggcatagacagggttaagaaaaccaacacaggatgttcagataccagcgaggagcaagagcaaggagctgttatacccccaagactgggggccaaagggaaggaaccatattctcagagcccagtaagggctggggctgtggaagaggcttcccagctagaaatatagtcttgaagggacatagccattgccagttgctggcagctaagcaggagaggaacagatgaagaaataccccaccttctcccatctcctgtttctagtctgtgccccttcttggctgaagccaactgaaagccagccagcaagggagcccaggtgaacaaatcagtctgtaggaagctggccttccagagcactgagcagatgataaatggagaagaaccggcacaggtgttcactcccagcagctggaactcagccttggttttgctcccatgacttagaagtcaatcctatttgggatttatgcttggaatttaactaccatttataccactgggtttatggaattttgatttctaaataatcaacttactaataaacttgacgacacaattcactagggcgttagagcctgcctttatactgaacaagtgggtgaagtgtttttattattaataagcacagtactgcctactcaagaaaaagaaaacttctataatcttatttggccaccacaccaaacgaactatggagccttttgatgatatacgtagtatcctcacaaaacacatgggaccagtatttggcaaatttgatttctaggttctgtcaaaccagttgcagagatatagctagaattttttttctcagttaaaaatgctttaagtctttgagttctggttttcatcctcctctgaatagttgctgtgtgaggatgtccatatctgactcattttactctacaaatacagaattgcacccaggtgtattttagggatattggtcaccctgaagttttcataggttttatagatatatgctggtaaggtgggagggcgggtgaataagaagtaaaatacaagtcttcctgaaagctgataatgcagcattggggtagatccctcattttctttctttattattattattttttttgagacagagtctcactctgtcacccaggctggagtgcagtggcacgatctctgctcactgcaagctccgcctcccaggttcatgccattctcctgcctcagcctcccgagtagctgggactacaagcacacagcaccacacccagctaattttatatttttagtagagatggtgtttcaccatgttggccaggctggtctcaaacttctgggctcaagtgatccacctgcctcagcctcccaaagtgctgggattacagatttgagccaccatgcccagtctctctctctttttttttttttttttaatagatatagggtttcaccatgttacccaggttggtctcaaactcctggactcaagtgatccacctgcctcagcctcccaaagtgctgggattacaggtgtgaccactgttcccagccaaaaatcatttcatctttataactctagcagtgggatctggggccaagttatatggctgagtggcatcacaatatcaatatatgattcgtcttttaaagtttttgttttagaatatgacttgagagctggacagccataccgaatatttccactggagcagagaggactgagaggccgctgcccaatttattgtatctgtgttgagtgctagatctacgaatggaactccatactagcaaacagcaacctcatttccagttcatttttctccttgcttgaggtgttctaaatattggaagaatcatctattctaaatcagaatgcccctgctttgtctactctgtgttttttttttaacaagaagccatatttattgtgtttattgatttattgatgcttagaaaataagagaatgttggtttagggcgggctgaaatttatctttttgctatgtagaaaagaggcaagttgctctaatcctttaagcacagaagcttataaggagaattcaaattcatgtctggtttgcctgtattcagagattctacagagacaaaattctctcctaaaaggaactgtataccggccagccacggtggctcacgcccgtagtcccagtactttgggaggccaagatgggtggatcacttgaggccaggagttcgagaccagcctggacaacatggtgaaaccccatctgtactaaaaatacaaaaattagcttggcttggtggcatgtgcctgtaatcccagctacttgggaggctgaggcacgagaatcgcttgaacccgagaggcaggagttgcagtgagctgagatcacaccactgcactccagcccggccaacagagctagactgtctcaaaaaaaaaaaaaggaactatataccacctggcatatatctgaagagaagcagggtggagggcaaagtaaaatataagttcagtggaaaaatacttggaaagccacttggtaacaataaagatattaattaaatcacccagggccttatgccataatgatatgcaccaggtgtttctgcttccacttaattaactcagcataattcctcttttagaaaacgacacatactgttggggtatatccagccgaaacacacatcagcacaaagcttttaaaatgtggttcttttcaatgtacatattagaatggcctcatttctttcactatgtgtgtactgaccttagtgggtcacctacattaaaggatgtggtagaaataaggcaatcccacatttacagacaagaaaacaaacaataatgtagttttatggaaactaagcttcagaaatgcaaggcattcactggtttcactcagaaacctctcagatgtgggagaaatatgtgtgagatttggactttcatttatccaaatatgaggaatttttctgctagagtcaactggctgataatggatggaaaggattagtgcaggtcctacttggcagccttctcggtagaaacccatatgctctctgacattgattataattatttttccatcattcccaggttacattcttagcaggaatgtgagccaactctctccctaggaaggctcctgctgtgaaaccatctttggcaatgaatctttaacaaaagatcaagaacttgacatttatttttaagcacgagaagaaaatgtgtgcaatgttggaagcaaggacagggataggaagagcttctaaacagttgcaggcaggggcagtggaacagaaataaatattacataagtgacatgttggtgactttacttttgtgaaatagcaactaatgactaggtatggaatatatggattatatgatgttaaggtttaacgtctttttaaagtagaagggtgctccctctccctctccccatggtctccctctccccatggtctccctctcatgccgagccgaggctggacgatactgctgccatctcggctcactgcaacctccctgcctgattctcctgcctcagcctgcggagtgcctgcaattgcaggcacgcgccgccacgcctgactggttttcgtatttatttggtggagacggggtttcgctgtgttggccgggctggtctccagctcctaaccgcgagtgatccgccagcctcggcctcccgaggtgccgggattgcagaccgagtctggttcactcagtgctcaatggcgcccaggctggagtgcagtggcgtgatctcggctcgctacaacctccacctcccatccgcctgccttggcctcccgaagtgccgagattgcagcctctgcccggccgccaccccgtctgggaagtgaggagcctctctgcctggccgcccatcgtctgggatgtgaggagcccctctgcctggctgcccagtctgaaaagtgaggagcgtctctgcccggccgccatcccatctgggaagtgaggagcgcctcttcccggccgccatcacatctaggaagtgaggagcgtctctgcccggccgcccatcgtctgggatgtggggagcgcctctgccccgccgccctgtctgggatgtgaggagcccctctgcctggctgcccagtctggaaagtgaggagcgtctctgcctggccgccatcccatctaggaagtgaggatcgtctctgcccggccgcccatcgtctgagatgtggggagcgcctctgccccgccgccccgtctgggatgtgaggagcaccactgcccagctgcgaccccgtctgggaggtgaggagcgtctctgcccggccgccaccccgtctgggaggtgaggagcgtctctgcccggccgccccgtctgagaagtgagaagaccctccgcccggcagccgccccgtatgagaagtgaggagcctctccgcccggcagccaccccgtccgggagggagatgggggggggtcagcccccgccaggccagccgccctgtccgggagggaggtgggggggtcagccccccgcccggccagccgccccatccgggaggtgagggttgcctctgcctggccgcccctactgggaagtgaggagcccctctgcccggccaccaccccgtctgggaggtgtgcccaacagctcattgagaacgggccaggatgacaatggcggctttgtggaatagaaaggggggaaaggtggggaaaagattgagaaatcggatggttgccgtgtctgtgtagaaagaagtagacatgggagacttttcattttgttctgtactaagaaaaattcttctgccttgggatcctgttgatctatgacattacccccaaccctgtgctctctgaaacatgtgctgtgtccactcagagttaaatggattaagggcggtgcaagatgtgctttgttaaacagatgcttgaaggcagcatgctcattaagagtcatcaccactccctaatctcaagtacccagggacacaaacgctgcggaaggccgcagggtcctctgcctaggaaaaccagagacctttgttcacttgtttatctgctgaccttccctccactattgtcctatgaccctgccaaatccccctctgtgagaaacacccaagaatgatcaataaaaaaaaaaaaaataaaataaagtagaagggtgggggaaatgtgattattccaaacccggcgtgtctttatgattttatatccaactgatcattcagggaggttattaggacagtggttgaaacagaaatttaggataatattctaagaaacagaaaaagcagtcttctcattctaactggcaaaaccaacagagataacaaaaaaaaattttttttttccccaggaagagcgtgtgcattcaaacttgttcattcattaatttgagttgaagggagggggacgtccttggtggaaaagttaaagaaagtgctctggatgagaaattcacagggtaagaatttttcattttcaaattgtccacctacaataaggaaatttcttccaaattaatttttaaaacaacaggtgcagaaaatggtgtggctgtcagaaaattaccaaattaaacataaaaagcttagcctgtctcctaaaggatggttatttctatcttatggtttcatgcactgtaatgattagtttctccattaaaatcaaatacagaatataattaagtcagtactccaggttacatgtcttaaaattccactagctgaaggacttgctagaggcagtaataaatactttaataaatacctgtaccataaatttacttcagatgtgacttaaactcagcacaaagcttaccataggcagtttatagcctctagatgggtaaatttttttttgctgagctatgctcttctaagcatttggataaagttcctaatggtattccactttctagctttgccaaaaacttagccaaaagtgatgtgtacatttttatacatgagaatgaaatcaaatgaaaagttttgatttaaaaaggaaaccacatattattgaaaactaaaatatatcttggttatggactcgtgaatactacatcaaaattcattgcagaagaataaattacccaatcttgtaatagagttttcagatatggaaaatgtatagtgttcttcctgtttaaacattgtagatttaaatcatttggttatataatcacaattcaattttcatctcaaattttcattgtcattattatatcacttaaaaatatataatcgagcacagtggctcatgcctgtaatcccagcactttgggaggccgtagtaggaggatcacttgagcccaggagttcaagaccagccctggcaacatggcaagaccctgtctttacaaaaaatttaaaaactagttgggtgtggtagcatgcacttgtagtcccagctacttgggaggctaacctcagaggatcacttgagcctggtagcttgtggctgcggtgagctgtggtcgtgcctctgcactccatccagcctgggagacagagcaagaccctatctcaaaaaaaatatatatgtatatatatgttctaaatattatatatatgtatttctaaaaaccactacaatcacttgtacttaaggtctattctcatcttcttggtttggcataaccaatacttctcactgaaggtaaagatgttaatagcaatggggaaaaaaaataacacttctccagtgccaggcaaatggccatatccatcaggagtgaagaaagctaatacgtttccacacatggttggctttatctcttccatttgaataagttattgcatttactatgtgcaaggttgtttgcaaaacatcttacatgcattgccttatttaattctcataaaaatctaaaatgtatatatttaagcctcccaaatacccagtgagagagttaatatgctccttctacagggagaaagctgaagctcagagagtttatttacctagagttttataaggaggaaatcatttcttgtaaccatctatgtcagttgggtcttccaggaagcagatgaggagatggagttaagaacacaaacagttgattcaggtgaaatgcctgttaaagaaaaaagggagaatcagcagcttggacagataaagcctttaggccattatattaatctgacacttgtgaaaaaaaaaaaaaagtgtggaagaggctgggcgcggtggctcatgcctgtaatcccaacactttgggaggctgaggtgggcagatcacttgaggttgggagttcgagaccaggctgaccaatatggagaaaccccatctgtactaaaaatacaaaattagccaggtatggtggcacatgcctgtaatcccagctactcagaaggctgaggaaggagaatcgcttgaacccgggaggcagaggttgcgatgagctgagatcatgccattgcactccagcctgggcaacaaaaataaaactctgtttaaaaaaaaaaaaaatagtggtgaagaaacaggattgaacaggagcacctcagaatgcaatgcacacctgacagttttggccaactcaatgggaaactccagagcaaagattgccgattggaagatatccacattggccagaaatagccagcccctagtacttccactatgttcagttattatctggagaccgttcaggaagagtgtggccttagcttgaaaactgaggtggtgtgaagctgctgcagctggaggctgtcaactaaccactctccttgcagctgaatggaagttctttctcgaatggagagccaagtggtgtgtcttcacaactgccacagttcaccccatgcaccatgcagctcccctcccatttagggaacagctactccagggttccagtgtgcctctcttgcagagacacttaaaagaggcagatcagtgggatgaactatagcccttgtcactgcagttggtcttgggattgcaactgatacttatcctctcccttctccactatccattcaaaattgactctccctcagttatcatctctagtggtctcagtaacttgctggtggtgtgacacaactttcatttctgaatgaagccactggtaaccatacttatctcaagctggggttgctgtactcatccatgtatgttctcagttgggccagggagtatcataaagcacccaactggactgcctgagttctccacatattcttcattgcccccacttgtaacagcagcccaaactcctcctgctaatcaggggcaattacccttgccaagatggcaactcttcttacctgctggttcatggacacgaagaattcaaaatgctggggcaggagccatattttatagttcaaatggaactcttgctgtttccccaaccatgacgtttcattagggcaacctcttgcagcctcctgctcctccattcttgctttcttttaatttttttatttttaattattattattattattatttttgagacagagtctcactctgtcgcccaggctggagtacagtggcacgatcttggctcactgcaacctcctcctcccgggctcaagcaattctcctgcctcagcctcccgagtagctgtgattacaggtgcccgctaccacgcctggctaatttttgtatttttagtagagacagggtttcaccat[132 bp omitted]caacatctccattggctggtcattgactttgtcctttgggacaccatattctgtgaactatctccacaactttctttggatcaagctcccttggctgccattctgttttgctggtcattactataattacaacgctctggcttctagtggttaagtgccgcccctggcctcttgcttcaggagcccaccatgctcattgctatccatgagccaagctctgtgacagcatctcctacccacagccctcgccagcactgaacttctccctgatgctggcatcccctccctggagtattcctcatgtccttggcaagtgaagcataagctctgggcctatgtgtcgcataatcctctgggggtcttctggcctcacagaagatatctattccaacatgtccacttccctctgcatctttattccttcctctaccatctgccagggcaatattgatatgataactttgctcagcatggaccattgctttctccatgcttctaagagccaccctagcagtaggtctgcaccatccccccagggcccttgccaggatgttaaatcccatatcctgggagagtaggcgtatgagattttaacaaactttccttcagccaatgttatgtcctggccccttcatcaggcaccctcaaaatccagtcccacaagtactctgactccttcaggtatgttccagtttatgcttgaagctccacttgagtataatcccttccttgctaccaatcccacctacattaggctgcaatttaacatagttgttcacctacagctgggagagaaaatgaggcatatgttgaaggggactcctgttgtcctgtgaggttgaggcttctacagtatcttttcacactggggaatgcaagctcttactgggagagggaagcaggaggagcaactctgcagcctctgaagattcagaggaatccagggaatcaaaccggttagaggtatgcagccaggcggctccatcccatgtgtcaggttccaggttttacataccagggccctgatcattgcataacagactgactcagctgagcatcaatcaggtttgaagctctgcaactcttaattgctaattctggagtttggcctttagctttttctatccttccactgcaggactaagggcctctttgtaaacttccaaagagaccctctggccttcatatgtagttttcaattgtttgttaatgatcttggcttttcattatcctcacatcccaccttcattgagcatcagtgcaacttcataataaccaaccaactcactgtccttgtatgcattgttcccatgctcccctcaccctcaaccctgtacaaaagtccaaattgttgcatcagccaaggcatttcccttcattgaaacattctcccgagtcccctccagtgaaagttttaccaactgggctgccaccttgtgccacaaactcttcacgtcccacataccaccctggatggggtccttgcaggctaagtggtgagtggtccagtccccaaaccctctcttatcaccactccttaaagcagatgctgagaaggagttaggaatgcaggtgattccttgggagagggagtaatgtctgtgaaggataaaagagaggaggccggattgtgcaaggagagtgttagaatagtgagcagatattataaagtctctgccaacccaacagggagctctatggcaaagattgcccattggaggagtcctgtgttgaacagaaatggctaggccctagcattcttgctgtgctgtcattggctagtgactacccaaggagacaatggccaaaagctgaacttcgaattctttcttggcaggagacagaaaaggctccatgtctgtcaccccatcatatttccacgcatttattaagtgctggtttgtgtggcatcctttgacaggagacataagacaacagctcagagtggaagaaatagatgttctcaggaagaggctgtatgctgtcctggtttcgagcatctgccctacagtcagaatgcctgcatttgaaataagtttctgccacgaactagctgtaagaccgtgggtgagttattcaacctttcagcacctcatctcctaaaatggggataatgttttcttccccaaagacttgtggggagggaccaaaaattaaatggattattgaatgtaaagtgcttagaccattggccaacagttcgtcagtgccctataactgttgcctgtttagcatgtcataaacacatgactcgcatacattacattaaaatagagcagagtatttaagtccagggaaaggaaactattatcagatgactgctctcttccaggcactgtaacactattttctcatgatcctctctttaatctttgcaataactcacaaggtaggttttaccagttgcagtttcctgaggaggaaaccaaagctgggaattattttatcctcaaagtggcaataagttgttggccacaaccgggatattccgcttttctcctcacatttagaaatgtcatgtggctgtgagtcaccttgtgaggatcttgtcacatccttagactgtactgccaacactgaaaatgcactgtggctgacccgtttaagcaaagccaggctgcaattttcctgtggattcccattccagcagttaggctgggctctcctatgattttgctaccactgcgattttgctgtgtggctactttagagactagagactgcctaatgtgagcaataggtgatctaacggacaatcattattggttgactcagcatctatcagttgactaaagttgcctttagtcaacggcagcatcatggttttcatccatggaattctgcggtgttggctccaccctcagctccaggagggggtatgtgcttggcacctggataattagatcatggcattcccagccacagtgatgggttttggggaaaggagacatgttacaatccaggccaattcatgtcaggccttaacttattttatttttgagacaaggtcttggctctgtcacccaggctggagtacagtggtgtgaccacggctcactgcagcctggacctgccaggctcaattgatcctctcgcctcagcctcctgagtagctaggactacagttgcatgcccctctacccagctaatttgtgtagagacagagtttcgccatgttgcccaggctggtctcaaactcctgggcttgagtgatccacctgcattagtctcccaaagtgttgggattacaggtgtgagccaccaagcccagcttagacttaactttatattgatggcaatgaaaagctttttctttttctgcctggagctataaggtcataaacctgccactactggtcacaatcttcctcccataaaatgaaagtaagcctcagaataaagccagaacagaggcaggaaaaacagagacatcaggagagcagtggtcctgataacatcatttgagcccctgattccagatatacctgaagcctgtatatcccttggcttttagttctgttaagtaaaacttatggggatgccattggtttggactgagctcctgcgctgggccccaacagatcagaccaaaccagaatggagtcactcatgctagctgttacgtagtcaaactgaacttagaagtggatcagttttccaaaaaaaaaaaaaaaggaagattcacagcaaccaatccaaagaggccccatcaacctgagctggcatgataaggaagtcccttctgctttaattctataagaaaagggactttgaaacaaccaaactgctttttgttccttatttctgctttcttctgcctcttctgcctgtaaagcccagctcctctgctcagctcctcagggtgcctttgtatttcatagaagaaacgctgcccaattcatgaattaccaacaaaagccaattggatctttaaacttttttgttgcaagtttgttctttgatagttctgcaagccaataaattcccttttcttcctttaaatcagatgtccttggccgggtgtggtggctcacacctgtaatcccagcactttgggaggccaaggcgggcggatcatctgaggtcgggaatttgaggccagcctgaccaacagggagaaaccccatctctactcaaaatacaaaattagccaggtgtggtagtgcatgcctgtaatctcagctactcgggaggctgagacaggagaattgcttgaacctgggaggcagacttgcaagagccgagattatgccattgcactccagcctgggcaacagagtgagattttgtctcaaaaaaaaaaaaaaaaaaaaatcaggtgtcctcaacctctaggccatggaccagtccacagcctgttaggaacagggctgcacagcaggaggtgagtggcaagcaaacaggagcgagcattgccacctgagctccgcctcctgttagatcagcagcggcattagattctcactggagcacaaaccctattgtgaactgagtatgcaaaagatctaagttgcaggctcctgatgagactctaactaatgcttgatgtactgtactgccaacagtacagtacagtttcatccagaaaccatccttcacggtccatggaaaaatcgtcttccacaaaacgggtccctggtgccaaaaaggctggggactgctgctttaaatagtttcagctgggatttctattacctgaaactaactcctagcagtgaatcattcagtcagtcaatattgaataccttcagtgtgctaggtatggtccaagtgtaggaaaacagcagtcaacaagacatacaactccctgtgggcctggatttgcatttgaaactgacattctcggccgggcgtgggggctcacgcctgtcatcccagcactttgcgaggctgaggtgggcaaatcacctgaggtcgggagttcgagaccagcctggtcaacatggtgaaaccccgtctttactaaaaaaaaaaaaaaaaaaaatacaaaaattagctgagcgtggtggcacaggcctgtaatcacagctgctcaggaggctgaggcaggagaatcacttgaacctgggaggtggaggttgcagtgagccgagatcatgccactgccctacagcctaagcgacacaatgagactccatctcaaaaaagaaaaaagaaaaaagaaactgacattctagtgagaagaaaaggagaaaaagtaaatgtgtatattgtgaatcagttatgacaagttctgtaagctggacaaggggaagtaagtgttataagggactcagggaacatctcacagatatggtgactttcagaagagacctaaaatatgtgagagagtaagccatgagtggtagcagggttccagcaagaggaaacaaaaaattcaaaggccctgagttgagtatatgcttacagaacagtgaggccaaagtgttaaacgtggccaggcgtggtggttcacacctgtaatcccagcactttgtgaggctgaggcaggaggatcacttgagcccaggaactcaggaccagcccaggcaatgtggcaagattctgtctctacagaaaattttaaaattagctggagacattggcatatacctgtggtcccagctacttgggaggctgaggtgggaggatggcttgagctcaggagttggagcttacattgagtctcgattgaaccactgcactccaccctgggcaacagagtgagaccctgcctcaactaaaacaaaaacaaaacaaaacccagagtgttaaaagtgcagtgggaaagaaggtggggtggaagatgaggtcagagaagtaacaagttcaaaccatccaagcccttcacagccattggagctttatggttttactcaacgtagatgagaatccattgggcaggtttttttttttaaatgacatgtgctaacatattttaaaagaattaatttggttgttgaatggagggggcaagggcagaagctaggaatccagggaggagaatattgcaatgatctggatgacagatggtgtctagggcagagtggtagcagtggaaattaagagtggtggacagataagaggtatattttgaaggctgaataaacaggatttgctgataaattggattttgggatgaaagaaagtgaagagtcaaggatgattccacagtttttggcctaagtaactggaagtttgggataaagtttcggtcctttttcttttcttttttttccttttcttttcttttcttttctccctctctctctctctctttctttttcttttttctttttttttgacagagtctcgctctgttgcccaggctggagtgcagtagcatgatctcggctcactgcaacctccgcctcctgggttcaattgattctcctgcctcagcctcacgagtagctgggattataggcacatgccaccacactcggctaactttttgtattttgagtagggacggggtttcaccatgttggccaggcaggtctcgaactcctgacctcaagtgatccacctgcctcggcctcccaaagtgctggaattacaggtgttagccaccacgcctggctggttctttttcattagttattagatacctattagatagccaaggtctgacagtcagacattcagaggagaggactaggatagagatatatatttgggactcatcagtgcatgatagtatttaaagttgtgagactgaatgagacccagtgcagtggctcacactcataatgccagcgctttgggaggctgaggcaggaggatcacttgagcccaggagtttgaggttacagtgaactatgatcatgccactgtacttcagcctggatgaccgagcaagattctgtctcaaaacaaaataaaataaaataaagctgcaagactgaatgaaacatgtgcatagataaagaatagatatgagggccaagtcctgggactccatgcttagaggtcaggaagataaggaggaaccaataaggcagactgagaaagaatagccattggggtagctgctgctatatatagtgaagaaaatgcatcaaggagggagtgatcagctgtctaccaggtgcactaggtgctgatttctgggacaagaaaaatgaggacaggaaatttattactagattgagcaatgtggagcttttaacacttactgctatcttatttatatactacctgttgacatttgctttttttctgtctcctcccattcttatgtaagctctgtaagctctgtgacattctatttcatttgctactgcattcctagtgtctaggacagtacctggcatataataagtgct[131 bp omitted]atatagtaaaaccccatctctactaaaaaatacaaaaattagctggacatggtggcgcatgcctgtagtcccagctacttgggaagctgagtcaggagaattgcttgaacccgggaggcagaggtagtggtgagccgagattgcgccactgcactcctgcctgggtgacagagcgagactctgtctctcaaaaaaaaaaaaatttattgaatgaaaaaattatgaaaacaggctgggcgcggtggttcacgcctgtaatcccagcactttgggatgccgaggcaggtggatcacctgaggtcaggagttcaagaccagcttgaccaacatagtgaaaccttgtctctactaaatacaaaaagttagccgggcatggtggcgcactgtaatcccagctattcgggaggctgaggcaggagaatcgcttgaacccgggaggcagaggttgcagtgggccaagattgtgccattgcactccatcctgggcaacaagagcgaaaacattgtctcaaaaaaaaaaaaaaaattatgaaaacaaggaaaagaaaattttatttcttaattcctctttgtacaaagatatcttgctttttatattttggtagaggaagtaatggtgtagcaccagttttgaattacgtttagaatctgacaaggtatttaaactcactaagcttttgtttccttatgcttaaaaggtgatggataataataagataatgtctgagattttacccagaaccatgtccagtacataacatgtactcaataaatgctttgtaaatatggaagggtcacatgagccagaccacacaatggcagacaaattgaatgcagataattaagtcatttgatataggaagtttcatttacttgagaagtgatttattatgtcttttctctgtctatactctgtctaaattcagtctcacaactttaaataccagaaaaaaggaagtgttgctagcagctgcatttccaactaaaagcacttgagtgtgtctcaagatgggataaggacggtaacatattccaaatagtgttgctattgtggtggtttcacattaaaatgtaatggctagccggacacggtggctcacacctgtaatcccaccactttgggaggccgaggtgggaggatcgcctgaggtcgggagtttgagaccagcctggccaacatggtgaaaccccatctctactaaaaatataaaattagccaggcatggtggcacatacctgtaatcccagctactcaggaggctgagacaggataatcactggaacccaagaggcagaggttgtggtgagccgagattgtgccactgcattccagcctgggcaagagcgaaactccatctcaaaaataaataaataaataaaatgtaatagcttttaggcttttgttttgttttgttttgttttgttttgttttttgagacaaagtctcattctgtctcctaggctggagtgcagtggtgcgatcttggctcactgcaacctccacctcctgggttcaagcaattctcctccctc[134 bp omitted]tggcctcccaaagtgctgggattagaggcgttatccaccctgtccagccggctttcaggcttttaaaaagtaccttgtgtcttatagattctatattttaaatctcattacattataatataataagatagataggtatactttggggagacgactccccctagacctagatcttctcctaggtcagcctgatctgaatcttacagaaggcaccagagtaggctggagcagatgccaaggcttggaaagactctgcaaatatgttgtgaagtgtcaacctcaaaaggttaactaggaagctactaaaggatcttggcagtttaaagtaggtaaagatattttcaaggagatcggcctttagcaggggaaaattatgctgagtgaggaggttaaaagggggtgggataaccagttagagttgagagctattctgcattagcacttaagcagcctgggcatgcggccaaatctcttgggttaatgtttcttctcctttgttgtccaggattaggcaacaatgtggccttctgtcattttgcatttctttgtctgttaaaaagagtcaataacctgcattctctttggacccagaatatttggccatcatctttcccctagcacagaaacaatgacattctggtattgatgtattggtaccggacattgtggggagatgtcaagatggtgattaaagttctgatcctttggaaatcagtgtttatgggaaggtactaaacattacaagaagctaagaatgcgaaggacaaatatttagagaaaatctccaagaacaaactcttccagatagcgacaaagtttgtattcgtgtgccaacaattcttgtctctcttgataatactattttttgccatgaaatgtgggttattacagtgatggggaagagaggctgaatcagaaaggatgttgacatttggcaacagaagaaagggtttgtatttttatttatttattttttgagacagggtctcattctttcactgaggctggagtgcagtgatgccatcttagctcactgcaacctctgcctcctgggctgaagcaatcctcccacctcagcctcccgagtagctgggactacaggcatgcactaccttcctctgctgatttttgtctttttagtggagacggggtttcaccatgttgcccaggctggtcttgaactcctgggctcaagcgatcagcacacctcagcctcccaaagtgctggattacaggtgtgagtcaccgtgctctgccagaaagggttttttaaatcttgcagtgtacccttcaggacggctgaaagcatgactttgtgggctccttttttgtactttggcttcacaaggggaatgacatctcccaagtgactctgtctgactggtctttgtcattattattacctcatttacttagtacttcctaatattagacatcgtactaagtgttttacgtgtattattccatttacttttcacaaaaaaaaactcatgaagtaggaactattaacgttctcttcatacaaagaaaactgagtcataatcccaccactggtgagcttttggtgatgtgtagcatctggatactggaaaagaagtccctagttgaggtgctaagagagaggaacaaacatatttagagcaacttgctgggtgcagtgactcaagcctgtaatcccagtactttgggaggctgaggtgggaggattgcttgagcccaggattttgagaccagcttgggcaacatcatgaaaccccatctctactaaaaatacaaaaattagccaggagtggtggcacattgctgtagtcccagctacttaggaggctgaggcatgaaaatcatttgaattcaagaggcagaggttgcagtgagctgagattatgacattgtactccagcttgtgtgacagagtgagactctgtctcaaaataaaataaaataaaaatgaataaatgaaacatacacatttgaattttcattcattcatattttgcttccttccatgagttgggcattgtattgggactgggaatacaataatgaacagatgcaggtcacaggctattgagagtccagtaattcaaatagttgtaatgcaatatgagaagtgtcatgatacagagcaatgttttcaaaacttttctaatgatgggaatccccagggccgcttgtgaaatatggaacttaacttaccagacttttctcatgtaaattctgaggttttagaatctggaatctggttttttttttgttgttgttgtttttttgaggcagagtttcactccgtcatcaggctggagtgcaatggcgcaatctcggctcactccaacctctgcctcccgggttcaagcgattcacctgcctcagcctcctgagtagctgggactacaggtgcgcgccaccacacccagctaggtttttttttttttgtatttttagtagagacagggtttcaccatgttggccagaatggtctccatctcttgaccttgtgatctgcccgcgtcggcctcccaaagtgctgggattacaggcatgagccgctgcacctggcctagaatctgttttttaactaacactaaagttgagtcgtatattcaggaaagtctgggaagcatagatgtaaaggtgtgtgcccaaatgctcgagaaacctaaggtggggtgtctactcagcctggggagttaaggatggcctcacagagaaggtgacagctgaagaggaggtgcaggaacagaagttatttcacaccccagcaggggaccctacccttgtgttctaaggtgtgaaagtatgagcaaacattgacctatttaggacactgagagcaatcagacactgtggaagtcaaaatatacaaagagaaatagcaagggataaggctggagagaaagtgagggccaggctatgaaaatcctggaatgccatgtgaagaaatatagattgatggagatgctttttagactgccttggttcttatttctattttatatattatcatatcatattttatatatttatacattagtatataatatttatatattgtatactataatatattgttatatttatatttactgaaattttttttttttgagacagggtctctctgtcacctaggccggagtgcagtggtgcagcctcaacctcctggtatcaagagatcctcccacctcagcctcctgagtagctaggaccacaggtgtgcaccaccatgcctggctaatttttgtattttttgtagagacaggatttcaccatgttgcccaggctggtcttgtactcctgggctcaagcgatctgccctcctcagtgttccaaagtgctgggattacaggcatgagccactgtgcttggcctatttactgaaattaattccttttaaattttccttagacaagactcagtggagtatcatggaggaatgagaggcttgtttctctggttctcagcaaaagggcattggccacactgctgggaacagaggtggtaattttagtgaagggaatcaaaatgagagagcccagatagagaggtgggcctcacagcgaatggctgagaaagactggagcagctgtcattgccttcttgagaccttttctgatcaaaccaaagaggacattctactttgtttttgtaagactaaatgctttctatacaaaaccagagcttaatgtttagatgtaaaatag[211 bp omitted]gaggcaggagaattgcttgaaactaggaggcagaagttgcagtgaactgagatcgcaccactgcactccagcctgggcgacagagcaagactccatctccaaaaaaaaaaaaaaaaagtatattttgatgctttttaatcacaaattataagaaactctctatattcattcaaagaaatagtacatgctcagatgcgccctgctccagggaagccttctctgcctccttctctttctctcttcccagtataggtacctctcttctgtgcttctgaaataccgtgagcatctaaacatattgcatacgcgtattatgtatttatttgtttatgctcatcgttgcatattatatgtttatttgtctacttcctccatttcattgtgagctctttgaaggcaaagaatgtgatatattctttttgtacacgtaggagtgagcaaaggcacataaatgtccaataaattttttttggaagagagattgagagagagaatactatgtttattctttgaaaccatactttttttttcttctaggacaggaagcagctaaatcatacatttcattatcaggacttttgactgctctgaactgatttcaagaaaaatgccttgtttgaatccagtagctgatgtggttgaaaagcacaaaaatatgctcctttgttagtgcaaattgattcaataattccatagctatcatcgggataaagcacatttaagccacatcgttcactgagaacttatgtgttttaaagtgaaattttcaagtcagaattttaacagagaaaggcaaaaatttttaaatattgacttctagaagcttgaattcaattaagcttgttttgctaagaataatttttactcaaaactcattagtaaatg[132 bp omitted]aaaccctgcctctactaaaaatacaaaaaattagccgggcgtggtggcgggcacctgtaatcccagctactcgggaggctgaggcagggaattgcttgaacccgggaggtgcaggttgcagtgagccaagatcgcgtcactgcactccagccttggcgacagaccgagactccgtctcaaaaaaaaaaaaaaaagatgcatatgttatgtacatttaaaaaatctcctagaatggaaagctattactttttatttcacatgcatcatttctctcattttagtatgaaacatttaaaaatattttccatttcatctttaatttgacttagccctgattttgtagactttctcaacattctgtgattattgcatcaggacgatgaaatatttcaaaacaactattttataaaacaattaaacttctggaaaaataacccatgtttttcttccgttatgtcacttcaaatgttcattattgaaaactttctcagtacttttaatgcttactaatcaattattttacaataatttattgagaaaaaattattctaaagtattactctaaagccttgggtaaaaaacatatttggatatttgtgacaagtaaaacagaaatgccaggcttcaaaacagattagctttggcaaagaaacatcttgctgaatgtagacatacagtatcctctctctataagaacaacttatgttagaatctgttgttgcatataaaagtcttatttgagtggaaacttgtacatctgtcaaatgaaactttgtggaaaagatcaattcattttaggaaaataagtaaaattaatatgcagaaaaaatagctttaaaaaagcagtgtacgttcattagcaatttggattcagacaatttgtcaaaggaagctgctacttgtatttatgaaactggggcaaaatgttggcagtcttgtcgggtcattttacttggaatcatggacggctgaagcaaaacaggatcttagacatcatctgggtc[137 bp omitted]aaactccacctccgagattcaagcaattctcctgcctcagcctcctgagtagctgggattacaggcatgtgccaccacgcctggctaattttgtatttttagtagagatggggtttctccatgttagtcaggctggtcttgaactcctaacctcaggtgattcacccacttctgcctcccaaaattcggggattacaggcgtgagccaccgtgcctggctgagaagttttttaaaaagcctgcactcagaccctgaccccttgttccccctttgttctccccaactcaattggtttggcttagggctcagaatcagggtttttttgtttttgtttttttaattgtggcaaaatatacaaaacatacaatttactatattaatcatttgtaagtatacacttcagcgttattaagtgcacttacattgttgtgcaaccgtcaccaccacccatctccagaacttccttcattttcccaaatagaaactccatacccattaatcagtaactccctattctcccctccccatcccttgacagccaccattctacttcctgtctctatgaattcgaccgtgctaggtagcgcatataaatggaatcatacactatttgtccttttgcttatgcttatttcacttagcataatgtcttcaagactcatccatgttgtagtaagtaccagaattttcttcctctgaaaaggcagaataatattccattgaatagatagatataccacattttatttatccattcatctgtcgatggacattttgattatttccactttttggctacagtgaataatgcctccatgaacatagatgtcggtttgaatccctgctcccaatttttttggccatatacctagaagtgaaattgctggatcatatgataatcctgtgtttaattttttgaggaactgacatagttttccacagcagcttcacatttttacattcccatcagcaatgcacaatgattccaatttctcagcatcctctccaacttaagtgaaattttaatctttatttatgtaacccttgatagtaaaaacttttctaaccctcttatctttaattatgctgtatttctaagttgcatggtccttttatagagagacaaggtcttgctcggtcatccaggctgaagtcccgtggtatgatcatagctcactacagccttgaactcctgggtttaagagatccttctgcctcagcctaccaagtagctaggactacagatatgcaccaccatgtccatctaatttttaaaaaagaatttccttagaggtggggttttgctttgttgcccaggctggtctgaaactcccagcctcaagcgatcctcccaccttggactccagaagtgctgggattacaggcatgggcctccgtgcctggccacaaatatttaagttcttattcttctatcttcaacagataccttctttgattataaaagcaacacaatatataattatcaaaaacctacaagtcacataatctccatttttccaggcttcaccaagttgagagtactcatggggccatattaacagtaatacccaaaagttgctggcttttactcccaggcgaatcttctttccttctgctctgccttgccacgttcggggaagttcccagaaaatctaagcatgatttgggggaagagtcactgatgtaatttcctagacagccactggagggcagcagctccctctcacccccgaccccagccctgaagaggatgctgccatcaggcccagagcattcctgaagcagcaaactctcagtcattgcatggaaactctacagaaacagggggactatccctcttcccaactcttggtcacacgttgtgacctgggtttcgtaaagtcctatgtggaaacaagcacatgtcagagtccaagcttaatagcgggttgagaatgtgatacacaacaggatgaccctgacagcctgcagctggcggctatctagcgttccctcacgcaagataagcagttttcacagaataacaacaataatcagacaaggtccctccgtaaccatggtggaacaagacaataacaagattgcaacttactcaatctgaacatgaacacagacaaagacattaaacaatcacgaaaataaccaaatagccaccctgatgtagtcacacgagtgactctagcctcccaggtaaaaattaagacacccaatcatcaggccgggtgcattggctcatgcctgtaatcccagcactttgggaggctgaggcaggtggatcacgaggtcaagagatcgagaccatcctggccaacatggtgaaaccctttctctactaaaaatacaaactagccgggcgtggtggtgtgcacctgtagtcccagctacttgggaggttgaggcaggagaatcacttgaacctgggaggcagaggttgcagtgagccgagatcacgccacttcactccagcctgggcaacagaggaagactccatctcaaaaaaaaaaaaattgcactttggggtttgcagcaacctcttgttagtatttatcctatctagtggagaatttctctttattttaactactgcctgaaagacactgctgtgatacattaatttttaatgtaagtaggtgcatagctataatgaaaacatcataataaatcttcatacgtgctgagaagataatcttgaaatctatattatataaatatcgtcacttcaatttattgtgtacaattaatgaagtttaaaaatataagttctgaataaaatttacagtattctgcttttcctttaagaagaaggctgaatttatcgtggacttttttggtatagctattgtagataggagttattgtcaactttatgagtcagctaagtgagaaacatattaaattatttttttattgacctgaattatcttaattggctccatcaaactcaccaaatattcaaccctcaaattggctttcctattcagaagatgaaagcaaacactgagagtagtttctgttaaaaatgcaattccatttaaaataaaagcagctgtctgttaactaccatgccatcaaaattaggctatcactgcatgtaattacttttaaaatgaaaattaaagtttcaattattttcttttattcagtgaggttaaaagacattttccctctccaatttttaatgtatattatttaataacgataaatagaaatgccaaaatttttaaaggataaaatgaagaatattaagcatcgtttattgttgcctaatattaataaacctactgagcttaaaatgtatttgagttatttcaaatggaatcatttttcctagactgtgtgctctctgagggtaggatagtgttttgtttctccacggtttcaagttttatccagaaaaacagggttgtcgaatattctgtatgaattgtttttcgaacttcaagaaacttcttgtatggccacaaaagtaatatcatctatacacttataagaaaatattaatatattttagtgaattgagttgcatgtgtggagacagatacaaacacacaatattttagaaataaacaaatccggccaggtgcggtggctcatgcctgtaatcccagtactttgggaggttgaggcagactgatcacctgaggtcaggagtttgagacgagcaaggccaacatggcaaaaccctgtctctactaaaaatacaaaaattagccaagcgtggtggcacatgcctgtaatcccagctacttgggaggctgaggcaggagaatcacttgaacccaggagatggaggttgcagtgagccaagattgtgccactacactccagcctgggtgacagagcgagactctgtctcaaaaacaaaaaacaaaaaacaaaaatccgatggagcagggcttcccagcctttctcatgtcatgagaagaatatatatatatgaatgatagtagttgaacagcacattggggtaaattgacaagactgctctcagcagaaggcaataacccagggcaggcactgcgcacctgagacatccaccagaactcccaagagtttaaagtgttcagaaatgtgctcgagccagctcctaccagatcccaagagccaaatgtgtatatatcttccccaatttgcacttaatgacagcttgctggtagtctgaaattgtccatggtaggagtacttacaccacggaaataaaacaattatcgaatacaagctgggcccaacggctcacgtctataatcccagcgctttgggaggctgaggcaggaggatcacttgagcccaggagtttgaggccagcctgggcaacatagtaagactctatctctaaaaagtaagatgaaattaacaaatgctacaaatcaagcctttttttcctggagagctggttgttacacatgtactttcaccttattgacccgagggaaggggtccatacctcaggacatttataactcgcttgtggcatacctgttgggcagctctgcaataaagtcttgttttttgttttgttttgtggtttttttttactctccaaatataagcggtttttgttttttgtttgtttgttttttcaagacagagtcttgctctgttgcccaggctggagtgcactggtactatctcagctcattgcaacctccgcctcctgggttccagcaattctcctgcctcagccttccaagtagctgggattacaggcgtgcaccaccatgcctggctaatttttgtatttttagtagagatggggttttgccatgttgaccaggctggtctcaaactcctgacttcaagtgatccaaccacctcagccacccaaagtgccaagattacaggtgtgagccaccgtgcccggcccaaatataagttgttttatacaaatcgtaccaggcagctgctctgtaatttgattttattatgtagaataaaaatttaaagtctgggtgcagtggctcacgtctgcagtcccagcactttgggaggccaaggtgggcagatcacctgaggtcaggagttcaagtccagcctggccaacatggcaaaactccgtctctgctaaaaatacaaaaataattagccaggcatggtggtgggtgcctgtaatcccagctgtttgggaggctgaggcaagggaattgcttgaatccaggaggcagaggttgcagtgagccaagattgcgccactgccctccagcctggatgacagatactcagtctcaaaaaacaaacaaacaaaaatttaaaacattctatgtcaagcttgagtaaaataaattttagagtaaatccaccttgaggctagaacatcatgtgtaaacactagcaactaactatagataagacaatatggagggaggaaaacctcagtgaaatttaagtttcgcccaatcaccttacaaatgaagctcaattcacaagtcccatagtctcagacagagctgtcagtacattcttagttctgtagccccctacatacaagtgagaaagaaagtttttatcattaaaaaacagagaccaaaacaaataaacaggacaacaaaatgtagaggtattgagataatgcaagaagtaaaataaataaataataaaactgttaaagacgtcttcagagagataagagaagatacgcacttatgaaataatacagagcccttggaaattgaacatatagcaggagcaaaaactttaataaaggaattggaagatgaaattgaagactcttttagaaagaagaaaaaaaagacaagaaagtggaaattgaagagaaaaaaaataaggaacctattggatcactgcagaatgtccaatacctgcctataatgtgaaatcctgcatggcaaggattttgtatgtttgatcattgcgtagaatagaaccagacacacagtaggccatcaataaatagttctgcaagaaatcaattttcagagtgtaaggatccactcagaacaagaatggggaaagactcatgccaacacacacgattgtgaaacttcagaacatcagagacaaagggatcttcaaagcctctggagaggagaaaaaacacatactcaaggatcaagagtcagattggctttgaactttagaatagcaaagttggaaacattatattccagtaaggagtcatcctgcactttttatacattctttcaaatgtccagtgatacagagaaacctttttcattcacccccagtgacagagcaatcttgaatatcttgcaagattacaccttatttgcaagcacatatgtgaactaaattctttcaaaatattgtcatcaaaaatgattagcaaagcaagttaacgtctaaagttttgtggcttgatattaactccttggtgctcaattaaaataaaacccatttattattcagtctattttgtgttccttcattgcatgcaattgcaacaagtagacattggaggcaaaaagtaagattacataacacaaaatagattctcaaatgttcctccaacaaagcagaaacgaataatgcttacctctggtcagtattcatgtggtgaccagggttagtggtactgccatgaggctccatgtggctggattgttgatattttctgtcaactgtcagtgacagaaactcaactcagtctagttttagctcctggaaatgggaagtccaaggggtgggtcctgcatcaggcataactggatctaagagtgcaaatcatgtcatgggatctctccttttacccttctcttcactgctcttctgttttctctgtgtggcttcatttccaggcaggccatccccatgtggaagcaaagatggccagcaaacagctcaggcttacgttttcctcatggctagcaattcaactcttgctttcccagcatttgcatccatctttggaaagaatttagattatgtcacttgctccctccttgaccaattgtgtgatagggagaattaggcactgtgattgggctgcctggttcataaactgatgagatttgttttagggccagatggttggtatctgtggggagagaaaggatacagaagttgggaatcaagcaggttctggatttaaacccatgtatctgacagacccacctaaatcccatagagtgggagggtgatagctttcaaaagaagaggatcagaaaagactcctccccatcctcctcccctcaagataacagatgatcacttacatgagattttccctaggagtcaaaattcttcacgctgtaagatactaaataaaatgcaatcgttttaagaagagcatacttgagaaaattatcaccttgaagtgatggacggcttaattagaatttaaaaaaagaaaaaaacacaacccacggcattatccaaattacttgaggtataacatacaaactctttggtttctaggagatatgtaaatgattcacttgtatttttaatttgtaagtaaatggtgccaggtttccagacagaaactgaagccaaatctttatccatggaacttcacagtgagaggcacatcttagagatgaatacaaatcaataatacaaattacccttatctaagtgccccaatattgtacctcttgtgctctggttatcatattcccacagctctgggtgtttcaaattagatgtggattcttccactttttttttttttttgagacaggttctcactttgttgaccaggctggagtgcagtggcatgattacagcccactgcaccattggcctcccaggctcaagcgatcctcccacttcagcctccagagcagctgggactacaagcatgcgccaccatgcctgcctaatttttttgtatttttggtagaaacggggtttcgccgtgttgcctaggctgatctcaaactcccgggctcaagtgatccacccacctcagcctcccaaagtgctgggattacaggtgtgagccatcacacctggcctcttattttttaaacatctcctttattgtactttatagcttcagaattgagctgatcaaaatacatgctattcaacttgcatagtaaaatctttccttgtgtctgtcagaacctgcctaactccttacttctatatccttcatctcccaacagataccaaccttccagcccctaaaacaaatctcagccccaggagggcactcatgtccgtcattcagagatttggcacacaaagtcatactcattgctaggctagctctgacatgctccaataactggacttcctacttgtctccaaaaccaggctttctggtaaccagtttttgtaactacatccctgtctgttccctgtgcctggatccctgacttagaaacctactgagaaccacactttctttagacctggaggcctgccttgttcttatcagtctctattcttatcatacctagggacagaaggtgtgctccacaacttcagcctaaatatctgacagataactctccatatttggagatctattcagggaaacacttaacatctaccacctgagacattccatcttctttgtattgagatgacaggtactgacttttcttttcttccttccttcctctttctttattttttcttttcttttcttttttttctttttctttttcttttttttggagaccgtgtcttgctctgtcacccaggctggagttcagtggcgcgatctcagttcactgcaacctctgcctcccaggttcaagcgattctcctgcctcagcctcctgagtaggtgggattacaggcgtgcaacaccatgcccagctaatttttgtatttttagtagagatggggttttgccatgttggccagactggtctcgaactcctgacctcaggggatccacctgcctcggcctcccaaagtggtgggaatacaggcgtacaggcataagccactgatcctggcttttttttttttttttgccagagtcgtgctctgttgcccaggccgcagtgcagtgactcaatctcagctcactgcagccttgacctacctgggttcaggttatcctcccacctcagcctcctgagtagctaggaccacaggcttgcaccaccacacccggctagtttttgtattttttgtagatacaggatttctccatgttgcccaggctgtgggtactgacttttcttggactgttacctaatgtctcttgctgtacctgcccaaggtagatttaccccccaccccacctgtgcccatcgctgtccctttccatgcctgttttaccttggtggaggaactctcttccagttcttgcccttctctacacctctgaggaaagcaagattatttcccatcctgctgcattttctcaataacgtgagtttcatttcatgaaaaaaattactctttaggcagagtattttaagtggatgctgggagagtaaagccaagctggattgtgtaatttttacacatcttttgtgttgctctcataagacaatttatacttaacttcctttattattccacattttgtcatttttgtctctttagcatctttttcctcctccccacccccccatcaccattttttttttcgatacagaatctcactctcacacaggctggagtgcagtggcatgatctcagctcactgcaacctctgcctcccaggttgattcttgtgccacagcctctcaagtagctgggattacaggcgcacaccacacgcttggcttaattttgtattttcagtagagatggggtttcaccat[137 bp omitted]catgtgggaactaactcttacccatttgatccatagatcttccctaggattcgatgtgtacatgtttggagagaaaagctgaggtacttaggctatgatgtaggcctgggcctactggagctatcttccccgacctttaaagtcaccctgaagaaagcttgaaggcaccaagtaatcagggaatgaagccaagccaagtagagatgacaaagaagaggcagaaagtcataatgacacatacaaccctgtccttcccagtaggtgagccaataaaccacttttttttttttttttgctttgcttaagctactttgagttgaatttttgtccttataatgaagagtcccaactaatatagccctgtatttcaagaaattcacatatctggccaggcacagtggctcacatctgtaatcccagcactttgggaggcctaggtgggtggatcacctgaggtcagtagttcgagaccagcctgaccaatatggtgaaaccccatctctacttaaaatacaaaaattagccaggtgtggtggggtgcacctgtagtctgagctactcgggaggctgagacaggagaattgttttaacctgggagtcagaggttgcagtgatccaagatatcatcactgaactccagcctgggcgacagagtgagagtccatcaaagaaagaaagaaagagggagagagaagggagggagggagggaaattcacatatctaaccaaaatccacatgttagaggtctgagggctaagctcttcttttttctttcccttcaagctctatcccacccctccgaaagcagatctggggagggtttccttgtaacttgtgttgaagcaatgtggcttaagtccaaagctgaagtagggctttcactaattctattcacatccaggctttccaatctatctttagaaaaagttggctctgccaggaagacactccttaagccagtggtgcataggatcaagatctgtttcataaaccctggcactgcagaagagatagcatagcaagcatatgtgagagaacaaacccccttttcagtgcatggctcctggttcctgcttctaatggcttgtcctgatgtcagcaatcaggtaagtcactcatctttccctgaaggaagagcaggcacggatagtgcagtgtggaccccccagggagtctatttctacaagtctcctttttgtctgtggatatggaaatattaaggagagtcactccctctgcctccccatttcttgggttctgatccccttttctctggtaatagcacctcatcctagttcttcccatactactcttagtactgtacctcgaagggttgctttgaagagaaaacccatcagaatggaccaatcagaacccatctctgaactttctgcatcaatttcaactttctgtgttggcctcctcaggtaataccatcttcaaagtcactttcctttcctaagggcctctgtaaagctgtttccctgtgaaatgtgtttccttatcatctcacttgagtagctttttttgtctccctttagacctcaacttaaatatgacttctgcaactcaaatttaccccttcagagaggtcttcccagtccgttctatttaaactaggacttccattgtgattctccaacttaaccctttgtttgtttcacaactgaaaggaacaattactatgttctaagtatggacagacataaggaaatgaaacgtatttgctgctaaaaattgagatgaataagtacattgaaccatcttgtaaaactacattttaaaatattcaataggagaaaaattgttccaaacgtggactgggatggaatattttttggaatataattcacaagctccttctggggagagaattgcattcctgataaaatacttaaggaatttttctgaactttaaattacgacttgttctgggaaaaccaatcacctggccatttaactaagtagagtgaccttaaacaaacattcttttgtatctaatctaaaagtgattaacctttctgttttcctataaaatatttctgccaagagtgaatctttggattggtctgctagaggccttttccttgcagtcagattgtagtaaaacattgcaatttgcttataactaaattatctgaaaagttttgcttttttattttttaatttttatttatttttgagacaaagtttcattctttttttaatttttttatatatattttttgagacggagtctcgctctgtcgtccaggctggagtgcaatggcactgtctcgctcactgcaagctccgcctcctgggtggttgatgccattctcctgcctcagcctctcaagtagctgggactacaggtgcccgccaccacgcccagctaatttttgtatttttagtggagatggg[148 bp omitted]tggcacggtttcagctcactgcaacctctgcctcctgagttcacgcgattctcctgcctcagcctcctaagtagctgggactacaggcgcccaccgccatgcctggctgatttttgtatttttagtagaaacgggatttcaccaagttggtcaggctcctgacctccggtgtgccacccgcctcagcctcccaaagtgctgcgattacaggtgtaagccaccacacccggccagttttgctttttaaaaaataacaacaacaacatacattatagtatctttagacactatatttattcataacttcttttgggtcttgtcctcacactagactatatagttttaaactgtaagctacaataggacagcaagcaggtttgtattacttggtgtttatccctaggaacaacttagcacagtacctggcaaacagtaggagctgcagtgatatttgttaagctgatgagtaataagtgaatgaatgaaatttaaatgtgtgcacatttgcagactagatgaatttaaacacaaatgagtgtgcatctcctctttgtctgtgacaaataaacatgaaagaatggagtccttcctttcccctctctgatctgtaatgtgaacgtacctgagcctcctcggcactctgtgattccctaggaaggcccctctcaaatgtcatctcatccaaacaatgcaaatcccactacaaaaatactggagagtaatgtttttactgaaggtttcaagggaaacagaagaggaagttatgaaatacactactaccagcaccttttaaatttttacctgaggctgggtgcgatggctaatgcctgtaacaccagctctttgggaggccgaggc[131 bp omitted]gaggcaggagaatcgcttgaaccttggaggtggagattgcagtgagccgaggttgcgccactgcactccagcctgggcaacaagagtgaaactccatctcaaaacaaacacacaaacaaacaattcttacctgaagcatttctctctccctagagagagagagccacacacctctctttttttttttttttttcttttttttttttgagatggaatctcactctgtcacccagcctggagtgcagtggcacaatctcagctcactgcaacccctgcctcctgggctcaaatgatcctcctacctcagcctcctgagtagctgggagcacagatgcgtaccactatgcccagctaaatttgtatttgttgtacagatggggtttcatcatgttgcccaggctggtctcgaactcctgaacttaagtgatctgcccaccttaacctcctaaagtgctgggattacaggtgtgagccaccacgcccggcctctctcttctttctgtcaaatctgttcagcctcccccccggtctttgaccctcgtacttcctctcttcctcttcctctttttccctgttatcttcccctgtaggtctcttcccttttctgaagtgaaacaagtgacccccttttgggttcttcagtttgcatctctacctccccagtaactactctaaagaaaagcttttcttcaggatacacaattaatagaatatgggagacaggaagggatgacaaataatcatttttctttttctttttcatattccttctgtctgagattacacaaagtggggcagaggattaattgagtgcgtaaaacagtagtgcatttagcacaaaacaatagaaaatataccaaaaaggctgggtgtggtggctcacccctgaaatcccagcactttgggaggccaaggtgggtgaagcacttgagcccaggagttcgagaccagcctgggcaacatggcaaaaccccgtctctccaaaaaaataaattaaagaaaaaaatagccaggcatggtggtgtgtgcttgtagtcccagctacttgggaggctgaggtgggaggatcacctgggctcagttagtcgaagctacagtgaaccttggttgtgccactgcactccagccagggtgacagagcaagaccctgtctcaaaaaacaaaacaaaatgatatatatagttttgttttatatgtataacttataaatgtatatatttataagcatgtgtgtgtgtacatatatatatatatatatacaccaaaatatgaagcctgtactcatataccaaaatatgaagcctgtactcagataccaaaatacaaagcctgtactcatataccaaaatacgaagcctgtactcaagaggtctgcagggacagtcctgtgtaattagacagattgtcctttaggggcactaaaagtattaaatgatttgccttggctttcatttgtgccaaacttgctagttatgtaattgacaactcaacttgttaaggcttctctgtgtaacttctaaaagaatgcatttgtctacctaaagaaagaaactgaggcaaaattaatatagtttatttgggccaaggttgaggactgcagcctggaaacacttcctagttatgttgggaagtgctccagagaataaaggagaggcttacgtttttatttttttaattttaatttaatttaatttatttatttatttattttttgagacggagttgcgttgttgttgcccaggctggagtgcaatggcgcgatctctggctcaccgcaacctccacctcctgggttcaagtaattctcctgcctcagcctcccgagcagctgggattacaggcctgtgccaccacacccggctaattttgtatttttagtagagacggggtttctccatgttggtcaaggtggtctcgaactcccaacctcagttgatccgcccgcctcagtctcccaaagtgctgggattacaggagtaagccactgagcctggctgaggcttacgtttttaaagaaaaaataatgaatcaggagagggggtgattacagaagtcgtttgtgaggaattttcttttatttttatttttattttttattttttggagacagagtcttgctctgtttcccagactggagtgcagtggcgcaatctcggctcactgctaccttgtgaggaattttcattggtttacagaaataatattgattaacgattggcaatatacattgctgaactatagagtatgagttatggtgtccagagtatggcattgttaggtttatttatagctacttggggtcagtaaatctagagcccacatagcaagtagcttcatgaagtgattacctagctcaagggggagtgaagcgtgactcttgttacatttcaatgctctgggcctgataatttaaagcggggcttgcatttctcagataaaaagtttctttctttctcacgttgcagataccatctgtatgacttttttttttttttttttttttttttgaggcggcgtcttgctgttgtcgcccagcctggagtgcagcggcacgatctcggctcactgcaacctctgccccctgggttcaagcaattctcctgcctcagactccctagtatctgggattacaggcacccgccaccacgccaagctaatttttgtatttttaatagagacaggatttcgccatgttggccaggctggtctcgaactcctgacctcaagtcatctgcctgcctcggcctcccaaagtgctgagattacaggcgtgagccactgtgctcagcccatctgtatgattttttaagtcacttaatgctctctcatttaaggggtcttttatcgccttccagatgcaacctttcttcattaaaaaaaatagcctgggcaacatagtgaaactccatctctacaaaaacatacaaaaattagcccggcatggtggcggccgcctgtagttccagctactcaggaggctgaggtgggagaatcgcttgagcccaggaggcagaggttacagtgagccaagatcactccactgcactccagcataggtgaaagagtgagaccccatttcaaaaacaaataaatcaaaattaaaataaaaaatatattgctaaattcttcattggacaaggatgcaatagacttcttgcaggccttctttttgccagtgtgggctgccaattatatgaatataggtctaaggatgctagagaaggaattttcagcattataccattcaagcaaatgttcaatgtccaaccaaatagctaattctatatgggacaaaaatagatggaaatgtgttatttgtagttcagcttgtgcttgctttttttttaaacttagcaaagaactgatttcatttttatatcctgctctattctctacagtgacttaaaaacacaatatagaaactttaaaaatagaatttgttattcccagtggcccaaaagggatatttaaaagagcctaaaagcaaaatataatgtaattcattgtagtgctgcttttagtgtaacttggggcttttaaaaaaaagatgcatactggttttttttctgattataaaatatgtctattgtgaaaaattgtttaaactcatgaaataaaaatcatcagtaatccccaaaccaaagataatccctactgacattttgggatatttcctttcatctttttttctagggacagggccagttacaagagcgtacaacctgtgcggtcacgcagggcccctattcagaagggtcccacacttgatttgaggttctgttgttgctttcttaaaattcttaataattttgaactgcattttcatttgcactgggccctgcaaattacacagccagttctgtctacagatgatgcacatactaattatatatataataacatatatgtaagatatatattatatataatatgtacattatatgtataatctgtgtcattaaaattctttgtaaatgttatttttttcttttttttgttcagtctccatagagactgtcaaaaattgcgaatgccaactatatttcaagtcattatggcggggtattgggaaaagttttcaattagcagtaatagcacctcggataaacctcattggctacgatactgccactgcacaaagctgtaaatgttatttttaacacatactatttcatcatatggaaacataatcatttatttaactatgtccctattttgttttaaattttaaattttttaaattttgttttaaattgtgtactgttataaataatgataagaaacatctttttacgttaattaaaaatagatttctgactatttccttaaaataacatcccagacataaaactgaagggataaaaggatatgaacattgttggacctttgtatttaaattgccagatagcattccagaaatattaatattatcagcagaaagtaagaaattctcttttcttactcttggtggcaaagaatattataattttaaaatatttggtaaatgagtaagtcaaaatattatccaattactttaatttccatttatttgactaccagtaaagaaggttttaaaatatacattttattagtcatttttatttcttcttgaaattgtccttagactctaaactcctcaacatgatttttaaggcacttggtgtcctaccactccgggtttatcttctaccactcctctccttcccattccccaccctattctaagctctagccatacttaattttatttaatatctacaatttgtcatgctttctcttgcttctggcactgtaaacattctacatactatttctggatgtctttttcaatatctcttgtctggttaatttctatttgtccttcaggtctcagcttaaacatcacttccccagaaagcctcccccacccccagattaggctgagtgccctgctaggagctcccaaatcatcctgtatttttcttcttcttcttcttcctcttcttcttcttcttcttcttcttcttctttcttctttcttctttcttcttccttcttccttcttcctcttcctcttcttcttccttcttccttcttcttcttcttcctcttcttcttccccttcttcccctttttcttccccttctcctccttctcctccttctcctcctcctccttcttcttcttccctttcttcttccttcctttctttttctttttcctcctcttccttcttctttctccttattcttgttcttcttctgtcttcttccccttctccttcttctagtacatatttaattttgaaatgattttagatttaaagaagagctacaaagatggtacacagagttcccatgtacccttcatccagcttccccagtgttaacatgttacataaccatggtaccatgatcaaaactaagttatgaacacagttatgatactattaactacagactttattcagatttcactaatttttttcattaatgtcccttttctgttctaggatctaatcctggatagcatattgcatttagttatcctgtctccttagtctcctgtacttcatatcttatagtgcttaatgtattttattacaatttcctcccattctagaatataagctctgtgagagtaagggctgttttttaaatttttcatttatttttatttttaaccattgcaacctcagttcttacagtcgtacagtgtccatagtaagcaggtggtttatatgactgaatagaaagcagaatttttccttaaagagtttctcagaaaagagggcaacaccttccatttaagttcttacgaaatatcctatattatgttacattctctcaatttttttatttagagcaataaagtactgttcaaggaactcacattagcctgaaaggacctcatagaatgcatggatgcttgtagagagcatctattggaatcagtaaaaaacggagacaaagacatttaaaaacctttaataatctgtgttttgggggctgtgacctcacagaggaaagggctggatgcccttgtaaacaggtttgtttgtttggttggttggttggttgggtttttttgagacggagtttcactcttgttgcccaggctggcgttcaatggtgcgatctcggctcactacaacctccacctcccaggttcaagcgattctcctgcttcagcctcccaagtagctgggattacaggcatgtgccgccatgcccagttaattttgtatttttagtagagacggttttcactatgttgatcaggctggtcttgaactcttgacctcaggtgatccccccatctcggcctcccaaagtgctgggattaccagcgtgagcctccatgcccagccgtaaacaagttttaaaagtagatggggagccaggcatggtggctcatgcctgtaatcccagcattttgggaggccaaggctggcggatcacttgaggccgagagtttgagaccagcctggtgaacatggcgaatcctcatctctactaaaaatacaaaaattagctgggcgtggcatgtgcctgtagtcccagctactcaggaggctgaggcacgagaaccacttgaacacgggaagcggaggttgcagtaagccaagatcgtgccactgcactccagcctggagcctcaaaaacaaacaaaacaacaacaaacacaaagtaaatgggggaatggtgggaaagagatggaggccgaagaacaatgctgattacaaagttcacttcaaaagcaattctgctaagtaagtggcttacttccctggtcaaagcaactgttatctcttgcctgaaactactgcaacagccttctaaatggtgtctctgaacccctcctatccatctacaatcttctgtccatg[369 bp omitted]gtaatagatttgcaactgatctttgaataaaaatcaaaattactaatgactttaaaaaaaaccttgaatccttagtctctctctctatcttttttttttttttttttttgagacagggtcttgctctgttgcccaggttggagttcagtggtgtaatcatggcccactgctgccttgatctcctgggctccagcaatcctcacacctcagcctcctgagtagctgggactacgggcatgcaccccatgcctggataattttttaaaatttttttgtagagaagtctcattatgttgctcaggctggtctcaaactcctgaagtcaagcgattcccctgacccggcttcccaaagtgctacgattataggcatgagccacagcaccgtctcaagctttccttaatggcctttgttagaattatagttataactataaactctgtaagggcaagatacacgttaatttttgctcacctttgtctttccaacagctagcaaagtacctggcacaggtaatttgtaagcacttatgattatttgaatacatgaacaaatgagatccttcattgggaaatgaattatctacccagtggtctaagagagtaagctttaatatttgtactttttggcttctggaactccatactttactctgagccctggcatcatgagaattgatcatccagtttggttaagaccattcagctctaccattctggaatcaaatacctgttcagcttacatgatgccttatttgaagatattcatttctaggtgtccacatcaaacaggtcatcaatgactgacatctgctgtctgattctctgaaaagtccttcatctccacctaagagagcaacctgatatttaccatatgagaattcttcccctcagctctcttggtcaccaacgatatgggtcgtttgtaggttctccaagttcttctcatggttaagggcatttcaggtgccctgcttggaaatgatagctcagtttctagtatttgtagagaaggaacataaaacttggtgcagcacatacttcaagaaatcttggagaattaagtgttgcttctcagtatctcactccagtacagaactccagttctgtagctttacacctcatgttgtaagcatgaagagtaacttagagttatcaggcggcttcatcagttatatagaaaaaaatgtatattttccttctgtataactgatagaatccagctctctgtagtatgtactttctataatctgtttgtggagtaaagctgagttaatagcaattgtatctcacacagatacattgctctgtgtcatgtgtcttgcctattacttccttggagaaagttatgaaaagttgtgtcctgtacagagacgccacgatgctctacatcttccatgctacttccttactccctggtcacaggcctaactcagagttctaatcctactgaacacttcattgtctaaatgccccatttacatcttcttcctctctccctgaaggctttcgtagattgtgtattcaaaagatcactgaatcaaaaagaaaatcaccattctttattttttttcctggcacttataatcatccaacataatacacatattttgtttacattgtttattgtgattcccttcactaaaatgtatgcttcagggatccaggaatgtctgtctgttttattcgcagtagtagtattagcagttagtatagaatctaaaatatagtaggtgctcattaaatatttgttgaatgaattaatgatgccaaattgatataagaaaggatattcaagcataactttaccatgcacagggtttttcatcatttcaaattgctgaacaaaattctcaaagttaaaaaacaaaaacaaacattactactttggaagagaatgtaggcatttagaacaaacaagatgtagaattagggaatttatactaaaaataccaccgaagagtgagcacttggagacaatctacatgtatccatatgtcacacatgtgcctgggctttggttgctagaaataatttccctgaataatttctggggaggggatgtgtttataaatgccctccttggcagagcacggtggctcacgcctgtaatcccagctctttgggaggcggaggtgggtggatcacaaggttaggaccatcctggccaacatggcgaaaccccatctctactaaaaatacaaaaattagccaggcatggcggcactgtgcctgtagtcccagctacccgggaggctgaggcagaattgtttaaacccgggaggcagaaattgcagtcactgcaacccagcctgggcgacagagtgagactccgtctgaaaacaaacaaacaaaaaatgcaacaaacaaaaaatgccctccttgatctgcttggctctgtcttcctctcaggatctcggtcacttggctttcttccttgccagaggggtattaggagatggtagctgagtccagggttttataaccaagggaatagggagaggcaacctcttggtggtgaggactgggctgcagcagcagtttccggaacctactttctcatgactgaacgtatgcaggctctggcttccccagtggcttcttggagaagtcaggtaacgactcatgggagatgaattatttattcttcttctgtgtcctccaacagattattgagacccatacagccattccagagatgttctcatttgatcaggcaaccagttgtgtttctttgagaagctgtagccccgattcctccttctctaggatggtactcatcttcctccctctccccacatacaataaaaatgagctctatgagcgtttttttaggttctgttttccgggtaacccaagctagagcctagagaagagggaagtattctgaaacaactcactttcaaaagattacatgaaaccacaggcatgtcttagggttcaaatcttctttcatgtgccttgattcaaaactgtatatttctacttcaatatagttaagatattaatctgtagcaaaagtcaaataaccgtaaaatgaaaaactggtagaacttcaagtgaagactggaatagttggagatgagttgttgtagtcagaaagacccttttgtcaaattcattcattcattcaacagaatgccaagtattaatctaagtgctagagacacaacagtgaacaagacatatggatccttctgaaaggagcttaaaaaca[139 bp omitted]atgtcgaaaccccatctctactaaaaatacaaaaattagccaggcgtggtggcacgcacctgtaatcccagctgctcgggaggctgaggcaggagaattgctggaacccgggaggcagagattgcagtgagctgagatcgtgctaccgcactccagcctgggtgacaaaaagagattccgtctcgaaaaaaaaaaacaatataatatcaaatagtaatcaatgattagaagaaaaataaagaagagagcatagagagtgatgagacactcttttaggtagcatcatcaggaaaggcttctctgggaaggaaacttaagcagagatcagaatgagggaggtatcagtgtagaagtctatgaaatagcatctactttagccacatatactcataggttgtttgtcagattcgctttgaattgagaataaataaatagagaagagaaggagaaaagtttttgcctttcttcttctttttttttttgtcacaaaaacatctaagcctgaatgtctcctaaattattctttgtggctggttagtcaatttagccaaagttgaaggtacttcctccttcttgaatgcaaaattacttctttttttctttttgtttttttaatagagacgaggtctatgttgcccagactggtcttgaactcctggcctcaagagatctgtctgcctctgctaacatggtgaaaccccgtttctactaaaaatacaaaaaaaaaaaaaaaaaaaaaattggccaggagtggtggtggacacctgtagtcccagctactcaggaggctgaggcaggagaatggcatgaacccaggagcagagtttgcagtgagctgagattgcaccactgcactccagcctgggcaacagagtgagactccgtctaaaaaaaaaaaaaacatctgcctacctctgcttcccaaagggctgggattacagatgtgagccactgcaccctgcccaaaattacttctagtcttattctagccctacactctgtctggtattattgctatttatttgcacatctcatatccatttaatatggcatatgatttttcttttaagaggcagaggctatgttgctctgttgctatgttgcccaggctggtctcgaactcctgggctcaagggatcctcctgccttagcctgccaagtagctgggactacaggcatgtgccatggtgcctgactaatgtggtatatgttttgaaagcaaagtctatatatttttagcattatagttcttgaaatatctagtacagtcctgtcacaaagtaaatacttatttgttgaatttaaatttagacagagtttcactcttgttgcccaggctagagtgcaatggcatgatttcagctcaccacaacctgcacctccagggttcaagcaattctcttgcctcagcctcccgaatagctgggattacaggcatgcaacaccatgcccagctaattttgtatttttagtagagatggagtttttccatgttggtcaggttggtcttgaactcccgacctcagatgatccgccctcctcggcctcccaaaatgctgagattacagacgtgagccaccatgcccagctgattttttaaaaaataaaatatctggactcagacaagtttacctaacctctcagagcctaagtgtaaaattgttattcctgtaaaaatcagaaataataatcatttgacagcatttattggtacaagaaaagagaaccgggtgtggtggctcatgcctataatcccagcattttgggaggccgaggtgggcagatcacttgaacaaagagtttgagaccagcctgggcaacatggtgaaacccagtctctacaaaaaatacaaaagttagctgggcctggtggtatgtgtctgtagtcccagctactcaggaggctgaggcaggaggatgcttgagcctggaaggttgaggatgcagtgagctgagatccagcctgcactccagcctgggtgacagagtgagaccctgtctcaaaaaataaataataaaataaataaataaataatctagtacaggaccagatacatggtaatatttaataaattgttggtcattcaatcaagaaattaagcatttttaaaggcttgatctgaaaccaggttatttgttcatgtaaagaatgtggtagttatttgttaatagcatttgttgttagttatttcccataaggaaatgatgatgtcatcacaagatcttttccttaatcagctttattaaggtataaattaattataattacatataattaaatataacttacatgtaattaaattcaccaattttcagtgtataatttttgacaaatgcacaccgtaatcagcatcacaatcaatatgtagaatatttctctcactgtaaaaagttcccttgtacctctttgaaagcaattttccccttctaccctcagcccctggcaaccactgatttgttttctgcaaaagatactttttactttataagcaaat[136 bp omitted]gcctcctgagcagctgggactacaggcgcccgccacca[135 bp omitted]tatgagggccttctacttagaagtccttgagctagatagatacttcatagaatacaaagataagtaagactcagtttatgtccttaaatagctaaaaatctagtctagtcgtatgtaattttgagattactctgtctacacataatatgggactgaatttcaatatgaattatgcccactaaagaagaataaggaagaaaaaatattgtaaatggttcctgaacttttagaatagtaaacaaaagattcatgagtgccactaattaattataatttattttaaaaggcacaaatttatgattacaggatttccagataatttttaaaaagtaaactctttaaaattaagtaacatacatacaggaaacaaaagtgcagaaatcctaagtgcacagcttgatcttttcagattatttatggcaacctagaccagcactgtgtgaccaatgcagtaaaaagacaacatcctgaagtcttatggtttagacagaataattacatcactgtaagaaagaaagagataagagaataatgttctgcaaaggctcacaaagaattgtggggataagtagtgagaaaatggatggcacattaaaattcatgaggaaatgccgtttaacttctatgaataacaaagcgattattatgcaggatcaggtttttctttcatcattacagaaagacacaaaatcattatcgtgatctgccatatgtttttcctttgttatcagatgctgggacaggcctattaaatgttctgtgttacccaggggaatggtcagggcggtgagtaatgatggtcacgatgcatatggttttctatagtcctaattgtcagtgcatttagatccgaggaaaggaacaaattaaaaagggcagaatggctgggtgagcactttcttgtgattgcaaagaactgggtctattcttaccctttctgccccttgctttatgctttacacctgccatttccagactgacaaggcgctttggtggcgccttggtcaatgcaatggggactacaattaatttaaaaaggggtaatgcatgcaaatcgcagaaaaatattaacaccaggagaaaaaacacagtgtggaaaaataatcctacaaaaatgtttatagtggggtcaaacatttacccacattataattccaatacatgcaaagaaaatactcctttttaatttctatcatggacctaatttttccttgcaagcttccaccttgctctataataagaggaaaaaaaccaaccaaacgttaaacttgtcattccaggcaacaatctttttttagtttaaatagtttattttggccctgcatggtggcttacttctctatttaatcccagtgctttgggagaccaaggaaggaaaatggcttgaggccaggagttcaagaccagcctgggaaacatagcgagaccccgtttctagaaaaaatttaaaaattagctgggtgtggcagtgcatacctgtagtcccagctattcaggaggccaaagcaggaggatttcttgagtccaggagtttgaggctgtagtgagctatgattgtgccactgcactccagcctgagtgactgagaccctgtctcaaaaaatataaataaataaataaataaatagtcacttttgaataacaaattttcttttggttaaatccagaatctttcacatttcttcctgcttccctctgcttctgttcaaaataatgtctagctgtacagagggatttgtgacctagggtggcaaggagaggaagggcctcagatctatgtgggggtctcaggatcaaatttgtctctataccagagtgcatgtttaggggagccagagatcaacccccttttgctcttagtggcctcttcagctagatctagaaaccaaattgacaccaggcagattaacaagggaaaagcaaacaaattgtattagttctacatgtacatgggggtattcacaagagcatgaagtctgaataagtagccaaagcaagatgcttttgtatttttagacaaaaaatgttacatttgaaaagaaatgacagaacaaagagtatctggccaggggcagtaaattttctaggggagtcactcggacatgtatggaggatgtaaaacaggtggaagaaaagggttacttcgtcaagtacatttattcgatccattgcagcctccaattctttttttttttttttttttgaaatggagtctcactctgcaccccaggctggagtgcagtggtgcgatctcactcactgtaacatcctcctccaaggttcaagtgattctcctgccttagccttccaagtagctgggactacaggcgcccaccaccacgcccggttaatttttgtattttagagacggggtttcatcatgttggccaggctggtcttgaactcctgacctcaggcaatctgcccgcctgtacctcccaaagtgctgggattacagtcgtgagccaccccgcctggcctgcagcctccaattctaagtctctggtgataagggtttgctcgctctggtatgcagagggtgcccctcccagaggcatctgtatctcttgctgcatgaaattacaatttctcaactgttttcaatttcaaataattactataccaatccggaatattttgggatggcacattcttcactccttcacatatctctgactaagttatttacatagtagaaataagttctctattatatcagaaaagttgcaaaagtaatttatttctattgttttttatttaatgttttttatctaccatgtatttactttttttatactttcctaccttctattgagttactgatttatttttcacccttactgacttgaaagttatgttaaaaaaattaacctttacttattatcgattaaaaaggagtttctctgataaaaaagtggggtttcaggtttataacgtaaagctttatgtgatatagaaaaatgtatcagtaaacaaagcatgttgttttcttacaggcttacacaattttgaaatcaatcttttcctcattgtaattacatagaagcttaaaatttttttaagtttgttttatccatttttccttgtatactttacctttggtggcaagttcacagttaccaagtatattttcttcacagtggtaaaattaacaagaacttacttttgctttttttatttataagaacaatatcacttccttttactgaatcaatgtttactcttaaatttgtaacatgcatggctcaacttggtctaagatactgtcagcctcttttgaacagtatacaatctgagaaactttattcctcccattcttcctgttattatagtaatttggtttcaccttttcaaaaaccctctcaacttagagtattaatttatttatttttatttttgttttattttttatttatttatttttgagacggagtctcgctcttgttgctcaggctggagtgcagtggtgtgatctcagctcactgcaacctctacctcccgggctcaagcaattctcctgcctcagcctcccgagtagctgggattacaggtgcacgccaccatgcccggctaatttttgtatttttggtaggacagggtttcaccttgttggccaggctggtctcggactcctgacctcaagtgatctgcccgcctcagcctcccaaagtatagggattacagatgtgaaccaccgtgcctggcctgagtatttattattattgcttttattttgttttattttgacacagggtctctctctgtcacccacactggactgcagtagcataatcacagctcactgcagccttgacttcctgggcttgagcagtcctctcacctcagcctcctgagtagctgggaccacaggtatgtaccaccacatggcactaattaaaaaaaaaatttttttttgtagagctggatcttgctatgttgcccagactggtctcttaactcctggcctcaagcaatcctcctgccttgggctcccaaagtgttgagattacaggcatgagccattgtgcctggtctattattgctttttaacagttaatattaatatagatttaccagtatttttactaacttctctgttcaccattagtacttacagcgggtcctttctcctgggtttaatttcttttctttctctctctctctctctccctctctctctctcctctctctctctctctctctctctctctttctttctttcgcaggcagagtgggcctggtgca[133 bp omitted]cctcccgggttcacgccattctcctgcctc[135 bp omitted]ggcctcccaaagtgctgggaatatttgagtgtattttttaaagcaatgacttgttactatatattattttagtatttgtcagaaaatatcttgaattctctcttgaatgttagtttgagtacagacttcttgattattttcgcttaacaatgtggagatgcccatcattgtattgtcttttccatttttgttgagaaatctgctgataatgtgttattgttccttcgtaggaaattttttgtttgtttgttttttgctttttgagacggagtctcactctgtcgcccagcctgggccacagagcgagactccgtctaaaaaaaaaaaaaaaaaaaattagccgggcttggtggcgggcacctgtagtcagtcccagctactcaggaggctgaggcaggagaatagcctgaaccagggaggcagagcttgccgtgagccgagatcacgccactgtactccagcctgggcgacagagcgagactccgtctcaaaaaaaaaaaaaaaaagaatttctctctttccagcgtggtccatgtttcattttggtcaggtgtatatggtttttaatttttcctgtctggggctcagtgattatctactcaaatattacttctttcctattcaaatagacattttccattactctggaactccttttagacatctattgaggcttcccatcccatcctccatttcctcacaggatactgtacccacagaatagctttgcattttctcgggaatttgcattccctcttcatttctggcatctgaagattcttatattttatcaagcatatctatatttttgttgcatcagatgagactggatcatccagatttaactcaccagactgcttgtagtcccatgcagcaaaaaaggtaaaatttctgtctaatttacaattaaatgaagaggtatagctaacttaatatgtaaagtaaaaattatgcatctgtgcaaagtcttagaattatgaattaaaatgtcagcattttggtaatccctagtgtctagactgtttcctttttgtgtgtgtgcttactttataatgagattgtaaacccagtggcattgggtaaaccttagaggtatcttgtaagaattctgtttaattttgctttattgaactttatgtactagaagggaagcaccaaaaatgaaattttagataaaagcctactattgaagcaattgtctatatttaatacatagaaataaagttagtgaaacatcaatatgaagcccataaacagttggcggaaaaagcaatggcctagagatttgggaagctgtaccctagactttgctctgcctctatgctgtatgaccttgggcaagtcattgaagatcttaaagtcttggtttcttcatctctacaaagtggggatggcagtctctatagtttaaaattgcattattctagatagtgcagagatagacagtgtcatttgaaaatgtcttaaaatcctgatact[137 bp omitted]atggtcaaaccccatctctgttaaaaatacaaaaattagctggagatggtggcgggtgcctgtaatcccagctacttgggaggctgaggcagaaagaattgcttaacacccaggaggcagaggttgcagtgagctgagatggtatcactgcactccagcctgggtgatagagtgaggctctgccttgaaaaaaaaaaaagaaccaacatcatacaaattgttccttttaaatagggtgtaatgtttggaaaataaagtaaaaaaaaaaatcaaccaaaaaaagttgaagaaactctcagacaagacctatttcagattttaattgtaaattttaagagtataagtcccttctggcccggcacggtggctcatgcctgtaatcccagcactttgggaggccgaagtgggtggatcatgaggtcaggagatcaagaccatcctggctaatatggtgaaaccccatctctactaaaaaaatacaaaaaaattagccgggcgtggtggcaggcgcctgtagtcccagctacttgggaggctgaggcaggagaatggtgtgaacctgggaggtggagcttgcagtgagcagagatcatgccactgcactccagcctgggcgacagagtgagactccatctcaaaaaaaaaaaaaagagtgtaagtcccttccttggctaaaattttcacttatggaaaaaaatggtgctagaacaattgtgtgtgtgtgtgtgtgtgtgtgtatataggtgtgtgtatgtatgtgtgtgtgtataccttgacccataccttgtgccatgtaaaaacatcaactcaactaaacatgcattgcaaatctcaatgtaagattctataactataaaaatacttgaagaaaacattggccaggtgcagcgactaatgcctgtaatctcatcacttcgaggctgaggtgggaagatccattgagcccaggagtttgagaccagcctaggcaatgtgaaaaaaataaacagtctctacaaaaaaaagtacaaaaattagccaagcaagaggggagggatagcattaggagatatacctaatgtaaatgatgagttaatgggtgcagcacaccaacatggcacatgtatacatatgtaacaaacttgcacgttgtgcacatgtaccctagaacttaaagtataataaaataataataattttaaaaaaattagccaagcatggtggcacatgcctgtagtccaatttctcaggaggctgaagtgggaggttcactgagcccagaagttcgaggcttcattgtgtgatcgtgccactgcattccagcctggaagacagagagagatcttgtctcaaaaaaagaaaaattaaaaataaataaaggaataaataagaaaatatatgaaaacatctttgtgacattggattaggcaaagatttctaagataccacaccaaaagcacaatttataaaaggaaaaaaattggtaaattgaactttatcaaaattaagaactttttgaaagacacaattaagaaaattaaaagacaagacatagactaggccaaagtatttgcaaagcatatatctgacaaaggactagtattcaaaatgcataaagaactctcaaaactcagtaagataataagcaacccttcccacacacatacaagtgggcaaacgttttgaacacacactttatgaaaaagttgtatggactacaaatcaataccttttgtaaaaatatgtttgatattgtcatagaggtatgcaaattaaaactgtaataagatactgttatcagtggaaggtagtccaagctaccggtggcaaatccgtatgggtctacggcaacctcagttcttgcctcctcagaacaaataattcgactgaggggcataaggcagaaaaaaagatcgaggcaagtttcagagtaggagtggaagtttattaaaaagctttagagcaggaaagaaaggaaagtacacttggaagagacccaaatgggcaccaagaaggtcaagtgcgacatttaaccttgatcttagaactttattttattttattttattttatttttgagatagagttttgctgtgtcactaggctggagtgcagtggcaggatattggctcactgcaacctccgccttccatgttcaagcgattctcctgcctcagcctcccaagtagatgggactacaggtgtgagccaccacgcccagctaatttttgtatttttagtagagacggtgtttcactatgttgtccaggacggtctcgatctcttgacctcgtgatctgcccgcctcagcctcccaaagtgctgggattacacgcattagccaccgtcccaggccaatcctagaactttatagactggcccacttctggtgtctagtacccctttcccatgatatttcccttagggtgggctgcccgcaggcgcaataccctctatatgcttgggaggtgagcacgcacagtgtgtttaggaagctgtaggcgtgcccatccgaagctttctttccttttccagtggagtgcccaggaaggtcatactccgtcattttgtttcccaatgtgcatgcctgtgaagttgcctctccctggtgtctgcattcaactaatcttttagagcgacaggtgtaaaccatcaggaaatggcctctccctggcaatttatcagcctctcatcaacaatattgatgatgaatgatttaatgactggtaactggctctgtgataattactcaaatcttaatatctggacactcaaaaagaatgagaagaaattgtgatgatgatatgatatcttttacttttggactgaaagttaggaatttctctaagttttatgatatggccatgccatctaattatgccaatgtgtcactgctgccaatttgtcacttttagaaaggcaatatgataattgccgaaccatttcctgacattcctggtgggtggggagagctctctcctgctctgctcatgcctgtctaactacctgtaacaataccattatctcctattagaatggctcaaacaaacgaacaaacactgacaatatcaagtcctagcaaggatgcagagcaactggaattttcatacatggctgatcgaagtgcaaaatggtccagctactttggaaaaacagtttggcagtttcttagaaacatatatttatctttgacccagcaattccactcctacgtatttaccctagagaaatgaaaactttgtcacttaaaaacctgtatatgaatgtttatagtgaatttgcacataatcacccaaaactggaaacaacatagatatctctcaactactgaattaataagtaaattgtggtacatccatacaatggaataccacttaataataaaaaggattaaactattgatatacactacaacatggatgaatctcaaagcaataatgctgaagataaaagaaggcagaccaaagaaggagtacatgctatacaatttcattcatatgacatttcgggagatgctaaactatacagacagaaaacaaattagtggttttgagggcctggaggtaaaggaaggagcggaccataaaggggtacaagggaatttgttaaagttatgaaaccattttttatcttatatttatagtggtggttacacaaccatatgcacttgtcaaaactggtaaaactcaaaaaactgtaacccttttccagggttttccttttccagaacacattatgaaaaagcacccagttgtgccgggcgcggtggctcatgcctgtaatcccagcac[135 bp omitted]gaggca[137 bp omitted]cagttgtaactgctggagtttttattgtttcagaaaagttcaagggaccgggcgcggtggctcaggcctgtaatcccagcactttgggaggccaaggcgggcagatcacaaagtcaagagatcgagcccatcctggccaacatggtgaaaccccatctctactaaaaatacaaaagttagctgggcatggtggcgcgcgcctgtaatcccagccactgaagtggctgaggcaggagaatcgcttgaacccgggagctgagatcgccccaccgcactccagcctgggcgacagagggagactccatctccaaaaaaaaaaaaaaaaaaaaaaagttcaaggaagaaacccagccacagcaaaacaaaaaccagttggatccagagatgcctgagttggagatgaactttggagatttctcctcattagcatactaaaaatccacccaggaaggagctattctccatttgtatgtagaggcgtgatcgcagactgggcctgagctggctctactccacctctacatatgataactcagctaacctgcctaataaaagcctttttatcacctttgtttagggagacactgctttggggatttatccccgatatcctccttacttattgtaagtaataaaatccccttgttaaatcttccttggttgtggtattggactgtcactggctaagtgatcaaacccacccattgtgtgggtaacaaaactatacactaaaactataacatttggaaattatgccccaataacctgaccgccccctcaaaagccttctcacaatgcttttcacagattttttttttttgagatggagtctcgcactttcgcccggctggagtgcagtgctgagatcttggggctttgcaacctctgcctctggggttcaagcgattctcatgcttcagcctcctgaatagcggggattacaggcgcgcgacacatgcacagctaatttttgcatttttttagtaaagacggggtttcaccatattggtcaggctggtttggaactcctgacctcagatgatctacctgcctcagcctcccaaagtggtgctgggattataggtgccaaccaccgctgctggtctttcctcagattttaatggtaatacttgacagagcaggaacattgccatcttggacaagcactgctattctaaagttccccttgatcaaaaactgcctaatccaaaaggcatcagcctaatggctaaggtcagcatgaccataaaccgcaaatgacatctctgaccggaaaccttccaaccataagataaacccctccccgactggagagatgtcagccccaagataaccttccctccaaccagagacattccaaccccgcaataaacttctccccgacacagaaatattacaagcctgtgataaattctcttgccctgaactcttaaataatcttagtctgtaagagagggcccctgactgaaatcggccaaaagcccctctcaggcttattctctaaaataaacctgtctttgactgttgagccgcttttaatgtttctttcctctttctttaattcttacaatacttaaatatgtaagctccttttttttcctatgaaaaaattgtatcataactgagaaatcaataaggacaataaaaattaagatattaaaataaggccaggtgtggtggctcacacctgtaatcccagcactttgggaggctgaggcaggtagatcacttgaggtcaagagttccagaccaacctggacaacatgacaaaaccctgtctccacaaaaaatacaaaaattagccgggcctgttggtgtacgcctgtagtcccagctactggggaggctgaggcagaagaattgcttgaacctgggaggtggaggttgcaattagccgagatctcaccactgcattccagcctgggtgacagagtgagactccatctcaaaaataaataaataaataaataaataaatataaataaaatggaaagaatttgcaatacaaaatctatgtgccttaaggtaagtcctactaaagacatgcagtaaatgtttatttatgtttcaatctgtttcactttttgattttatgagttaaatgtcaatgaaaaatttttttcagagaaatagtactgtttcatttttcttttaaataatgttgatctgaaatttctcaagtaaacccagcttgccaccttcaggtcactgaaagatttacagagactatagtcagaacactaatactgcatctttctcaataatccataattaataatatcttgatcactctattgtgcctttgtcaaatgcactctatctagaatctttccctagcatttactggaatcttcccaactttcaaagctcagttcaaatgtcactaactcctagaagccttcactgatcactctagctagtttttcctcctctaaatattttatttccttgattacttgtaatctcactgaaggtaataaccatgtcctacacatattttatgcctctgcgtggctattaaaaaaggtgcatataagaattgtgcattctagctggacgcggtggctcatgcctgtaatcccagcactttgggaggcggaggcaggcggatcacctgaggtcaggagtttgagaccagcatggccaacatggtgaaaccccgtctctactcaaaataaaaaaattagccaggtgtggtggcaagcgcctgtaatcccagctactcaggaggttgaggcaggagaattgcttgaacccgggaggcggagattgcagtgagctgagatcatgccattgcactccagcctgggtaacaaagtgagactttgtctcaaaaaaaaaaaaaaaaaaaaaaagaattgtgcattataatatttactgaatgaacacatgaatgaataaataggaagctagagtaaacattgagctttcacttggaagaggtcccattttactagtaaattaacgggaattctacacatttattaaagactatatgcatacatataaaagcacaattttcattgacaactagcagtgtctcaatctctattaagctctcaaacaatattgttgatgaatgatttaatgactatttggtgactggctttgtgataactactcaaatcttaatatctagacatttaaagagaagaaagtgtgatgatatcttttactttttttttttttttgagacagtctcactctgtcacccaggctggagtgcagtggcatgatctcagctcactgcaacctctgcctcctgggttcaagtgattatcatgcctcagcctcctgagtaagctgggatcaccggcgagcgccgccacggctggctaacttttgtatttttttgtagagatggggttttaccatgtcggtcaggcttgtcttgaactcctggcctcaggcgatctgcccgcctcggcctcctaaagtgctgggattacaggtgtgagccatagcacctggctgctattttttacttttggactgaacgtgagatatttctcttgttttgtgatatggccataccatctaattattttcctctaaacccccaagttgctaatatactataagcttattaataaaatatgtaaccgtggcatgtagtccaccaatacatgactcagaaaaattcccaaattttttgtctagttccatttagtttagggcatgaggttttctttcatgtttacattctctctagaatgaagttcccctctctctctttcaaggtctacatgtatccaggactactagatgaaaaactggtcatagatgtttgtttctggttttttaatggagaagggaatggtccacacttgagaatggtttatctccttgaattccttccattagaattttctttctttcttttttctttctttccttttttctgaaacagggtctcactctgtcacccaggctggtgtgcagtggcaccatcacagctcacactgcagtcttgtcctcctgggctcaagtgatccccctgcctcagcctcccaagtagctgggaatacaggcatgcacctccatgcctggctaatttttgtattttttgtagagatgagtcttgagatggggtctcactatgttgcgcaggctggtctcaaactcctggtgtcaagtaatccttctgccttggcctcccatcgtgttgggattacaggcatgaaccaccacatctggccccattagaactttctaacaaaagatgatctttctcctgccccctagagggctgtttatcccttctgtcagtccttcctttctcattatatcctctccactctctgccctctgcctaggcccagccttatccatctgagagaggaagtaaccagtaatttgagcatgcacagaaggctctgatttgggacctcatgtcagcagtgtctttggatttttgtttctgctttgttgagggctgaacaggaagataggcccatgggttaccagtgagatagaaaaaggggaggaaaatacagagaaacaatcggattcacattttgggatacaaatccaccacaaatgcaagtttataatacctatgtgggctaaaagtttgttctctctcctccagtcctttatctttcctcaaaatgtgaacttggtatttctccctcatcagtatcagtttcaactctcctaaacaaatcttctaattgtaccccaatactttcattgaccaagtcttctcttaatcaccacatacacactgtagtagcggcatctttttccagctattcttttctctccctttcatttaccctagttgattctaaccagccatccccaagtgtattaggtacattttcagtttgctcgcgaattctcatttactcacaatatggcttctgtctgcttccctttaccaagacaagtcttgttttggtccaattaatgagcttttaaaaaatccatgtagcttgataccattgctcactccttctgtgaacaattaggttctgttattaattaggtttgtacatatcaccatttttctagcattttaaactttctggttctgactgtaataatatctttgataattttcctttttttttttttttgctttatttactccttttaaccatcacaacagtggtcctatacttttctttctttcctgaagatgattttaaaattccattccatttttgtaaatctgtaatgttgagtctcttttggatgctctgaaacaggttgcttggattgtggaatattttgaaagactgcttatgaggcaatagcagcagggtgcaattcagacttctcacacttctttaaataccagttctttcaggagtttttttttttttttgagacagagtctcactctgttgtccaggctggagtgcagtggtgagatcttggctcactgcaaccaccacctcccgggttcaagagattctcctccatcagcctcctaagtagccgggattacaggtggctactaccaccctaggctaattttttgtatttttagtagagatggggtttcaccatgttggccaggctggtctcaaactctcaacctcaggtgatctggccacctcagtctcccaaagtcctgggattacaggcctggtctcaggtttttaatgtaacccaaagataagaaatagattcaatgtcgttagggacactgacctttcttcccagattcaacccatttattttctatttttactctgtacttgagttttgtttgtcattgtaatttgtaaactcactgggtaggaaataattgttgatcttctaatttagaatagccccaagcacatggttatcatggtaacatgctttaaatgtccttggttataaaatgaacaatgttaaacatcacttgaatttttcacttttatttttcttcattctttgcttgcaggttttatattctatactctcaataggtggttctcatacaagaatggggtcagttctattagagttacaaacattggaagaaaatacattattttggtaccaaaatctaaatacttccatctcccaatgcagtttagtggttattagtgtgactttgaatcttggccctcttagttctttgttttgtcaccacaggcaagtttctaacacaaaaattagggatagtaataacctaactgtatgagtttttgtgaaaaatagaggaaataatttacagttgaaacctgaacaaggtggggttaggagcacgagccttttgcactgtaaaaatctgcatataactcttttctttttttttcttggagacagagtctcgctgtcacccaggctggagtgcagtggcgcgatcttggctcaccccaacttccgcctcccaggttcaagtggttcttctgcctcagcctcccgaatagctaggactacaggcacgcaccaccacacccagctaatttttttgtatttttaggagagatggggttttgccatgttgcccaggctggtcttgaactcctgaactcaggcaatctgcccaccttggcctcccaaagtgctaggattacaggtgtgagccactgcattgggccaaaatctgtattacttgactccccagagcttaactgttaataccaactattgcctggaagccttaccaataacataaacagttaattaatacgtattttgtatatgtattatatactgtattcttaaagcaagctagagaaaataaaacattaagaaaatcataagagaaaatatatttactattcattaagtttaagtggatcatcataaaggtttccatcctgttcagtaggctgaagagaaggaggaggaagacaaagggttgatcttgctatctccagcttagcaggtgcagaagaaaaaatctgcctacaagtggacctgcgaagttcaaaccagtattgttcaagggtcaactgtatcagaaagatttgactactatgagctaagtggtaatcatcattggtctgaaatgatgatttttagaaagtgactttattatatcactgatagagatgccctatactgaaatactgagattaccaataccttgcctgtaccacaaatgtatttttgccattttgctttctgtttctataatattttgaattcctaacatgatccagaaggctgggagatgctcctaatgaaagagagaaacctggaatgttctcctatttaccagattgcttcctctcatacccaggttttgagatataaagttgttacaaagttccaacttatttggtatcattcaaaatctgatgagcttgcattttaagaagtgttgatcagttccatttaaaagcagttggtatgagttcactttattttttgaggtggaatctcgctctgttgcccaggctggagtgcagtggcatgatcttggctcactgcaacccctgcctcctaggttcaagcgattctcctgcctcagcctcccgagtagctgggattataggcgcgtgctaccacacccggctaattttttttatttttttatttttaatagagacggggtttcaccatattggccaggccggtctcgaactcctgatctcaagtgattcatctgtcctggccccccaaggtgctggcattacaggcatgagccaccatgcatggccatgacttcacttcaaatgagcacagaaaaatctgggggcccaacaaccttatggtacatcttttgaagcctggtcagacaagagggtctttaggtgatggtgaagtgacagttttgagttgtcttctttggtagtaagtgttggctaattctaacagcaggaacaattgaggagtccaacaaacaatcttgttcacattgcaatgattttgttacagttgacactaatttaaaaattggcaggctctagaccagaaagacctgcccccaaagtaccttttctgaaaaagttgccctgcctcagatgctgtgtatctgttgaacttttcagctactgtggtttccaaggaatgcacctctatcaaaaatgagcttaattcctaaggaagtcaattattattcctccattccagcaaagtcaacaaatattgacagcccaccttgaatcactgtgctgggccctggatgtagcagtgttttaatatttcgactcttgtgggggggggctttacaatctagctgggcagaagaggaaacatgcaaataaattaaaatgcagggtcctatgagggaaatgaacagccttggtgacctaagttttgataataacataactaaaagttcggctccacaactcagtagctgtgtgccttggacaggtcatatcagattaggaaaggtgagaatgagttgaggaacgcagcactctgggatcatggttccagctccgggcagagggttacatcgtgtcaagtgtgtgaaggcagaatagcctgcagagaccactgtggcgttgaaaagaggtgtcgtcgcgaccttcggcgccggagaggcgaaacaagagggggtcttcgggccctcaggtatggctcagccgcccaaggcgaagcgcacgtggcagttggcgggaaatccctggggggtggagcctcggctcgaggtccggccgccccgtaccacgtcatcgagcagctccccctccccttgctacaagtcgcacgcgcggaagtaaacacctctacgtcatcagggcgcgtcctcgtctttcccctcccatctcctcagatcggtggacgtgctcgcctccactcggggccaggtctatgtcccggtttcccgcagtcgcgggcagggcgccaaggcggcaggaggagggtgagcggtcaagagacctccaggaagagcggctctcggctgtttgcatcgccgatagaggtgcggtccgcgggacggtacggaagccagcgggagttacggcgtgggggttttggtggggggatgaaagtacgcctttggcaggctgagaagagtagtgaggaagccgtggcgttctcctggctttccaagcccgaggcgaactttgcgtccaatgagcactttgccttagaggggggcggtcccagattcaagttaggcgaaaaccttactggggggcgaaaaagtgaaccccaacgcccgaaatgcattctgttcttaaacaggctcatagaccctttgttctctacccattcatcccccccacccttcgtcgggccgccagcctgcctttgggtacagtatgaagggagccagtttccaggagccagtttccatggttacccaccacttggccttctgggatatcagtcgctctgaacagggacctaacttgaaccatgaatcagaagcaaacacaggtggcttctaatccagctgagaattttctgctgtgttccagtttttggtctattgttaaataaaattgagttttgtgcttctgtgtaagtatgcatgtgtatacgttgccttgagctatacttgctttgaaaagtactttgagttatgcgtgaacaaatgctcaagttgctggatttcaccaaaaagttgttctgggctcattaaccctcacttacaaattgcgctcattaacgctcacttacatgagcgatttaactgagaagtcatggatgatcccgtccagccctaaaattctattgcctttctggttttagtcatgagaaattgagtcagagatatctttacaagtcttttaattgacttgtttttctgttattacagaagagaaaggatgcacgtcccaggagggaggaactactccaacttttcctattcagaaacaaagaaaaaagattattcaagctgtgagggacaattcattccttattgttactggaaatacaggaagtggtaaaacaactcaactcccaaaatatctatatgaagcaggtgatttttttctgttgtaataattggaaatattttaaaaatatcctctttttaaaggccagtaggacttctgtactccatgattgcccagtatttgctttatagtcccgcttctcttggcacacccccttcccctatgtctcctttgcttctttatggtctatttcaggttcaagaattagttgggatggcaaattttcccatttttaattaccataataatctcaaatagaattacatctagatattccattttatagaataaagttgtctagcagtagactattaaccattggatactgaaataattttgaggggtaagagatatgtgatatctgttgctgccattagtacttcttggttctttctctagagcattatcaggtaaatatttatcccctgactttgccagcgcaagccaactaacaaattacctttaaaatacgttaagtaaagttaataggaggcctttggtttggactgatcccccgcactagacccaacagaccaaaccaaaatggagttactcatactgaagttccacgccaccaagtctagaaactaaatttttcatctactgagaaatcaggagaaagagataatagccaaatccccaaacagaccagttttaggagcatcaagaagtttcctctgctttaactttgacaagaaaagtaactttgaaatgagcaatctgctttttgttttctgtttctgctttcctcagcccttttctgtctatacaatcagcctcctctgctcagctcattggaacactgattctattttatgagacgatgggttgatgtga[134 bp omitted]cacagtgaaaccctgtctctactaaaaatagaaaaaaaaaaaattcgccgggcgtggtggtgggcgcttgtagtcccagctactcgggaggctgaggcaggagaatggcatgaatctgggaggcggagcttgcagtgagccgagatcgtgccactgtactccagcctgggagacagagtgagactccgtctccaaaaaaaaaaaaattttttaggccgggcgcagtggctcaagcctgtaatcccagcactttgggaggccagggcaggtggatcatgaggtcagcagttcgagaccagcctggccaacatggtgaaacccgtctatactaaaaatacaaaaattaggcgtggtggcgggcgcctataatcccagctacttgggaggctgaggcgggagaatcacttgaacccaggaggcagaggttgcagtgagctgagaccgtgctgttgcactccagtctgggcaacagagtgagactctgtgtcaaaaaaaataaataaaaataaaataaatttgttgtaattttgttttttgacaagtgtcattcagtatgacagaactttctgtcataaggtttgtaaagagcagtattatattggatatgatttgccttaaaaaataacaaatgtattattctaatgcttcaatctaaggtgccatctattaagatatatcactattttatgtgcagtaatcccttcttatccttgggagatgccttctaagaccactcaatgcctgaaactgccaataataccaaaccctgcatatactatgtgttttcctatacatacatacatacttttgataaagtttagtttataaattaggcatagtaagaaattaacaacaacaacaataaaatagagcagttatgacaatatactgtagtaaaacttttgtaaatgtggtctctctctgtctctcaaagtactgtaacatttttggacctccactgactgtaggtaactgaaaaattggaaagcaaaaccaaaggtaaagagggactactgtattagtaagaatggaaatgcgccatcgattttaagatgcagctccattcccaaatatattaaaatggtatatggaaggtgcatatatatatatatataaatatagatatatatatttatttatttttttgagatgagatcttactatgtcgcccaggctgatctcaaactcctgagttcaagcaatcctcctacctcaaccttctgagtagccaggctcctgagtagctgggattacaggtgtgtaccactgctcccagcagaaaggtggcatatttaagtccagttttaggctgggtgcagtggctcatgcctgtgatcccagcacattgggaggctgaggcagatggatcacttgaggtcagaagtttgcgaccagcctggccaacatggtgaaaccccatctctactaaaaatacaaaattagctgggtgtggtggcgcgcacctgtaatcccagttactcaggcggctgaggcaggagaattgcttgaacccaggaggtagaggttgcagtgagccgagattgtgccactgcactcccgcctgggcaacagagcaagactctatctcaaaaataaataaataaataaataaataaataaataaataaatccagttttactcttgtggcaaaagtaaatttattttgggaagtgtgtggaattttatgaattcttatgtttcaaaattcttggcttacctttagagtagatttttagacagaaaaaaacagacaaagcctgaattctaatttaaaaaatatattttttacaaaaaaattagctgggcctggtggcaagcgcctgtaatcccagctgctcaggtggctgaggcaggagaatcgcttgaacccaggaagtgaaagttgcagtgagccgagatcgcgccactgcattccagcctgggcaacagagcaatactccgtctcaaaaaagaaaaaaatatatatatatctatatatatatatagatatatatataattttttctttctttttttttgttttggctgggcgtggtgtctcaagcctataatcccagtactttgggaggcagaggcaagtggatcacctgaggttgggagtacaagaccagcctgaccaacagggaaaaaacccgtctctgctaaaatacaaaattagcccggcatggtggcacatgcctgttatcccagctactcgggaggctgaggcaggagagttgcttgaacctgggacgcagaggttgcggtgagccgagattgcgccattgcactacagcctaggcaacaagagcaaaactctgtctaaatatatataatatacattatattataatgtatatttatatataatatatagtatatattataatatattataatgtatatttatatataatatattataaattatataatacatataatatgttatatattaatatatataatatataatatattataatatatattatatattaaatatatattagtatataatatatataatatataaatatatataatataaactggatttatattatatatatttatatattatatatataatatatttttgcatggttattaatatgtattattttaaattaatatttaaatttccatgatgcaaacatagcagtgtgtttttaatttgcgagatattcttttggaaacattcaagcagttttgtgttgattggccaaaaacaatttagctctaataggaagacaattgctaacattgttgtgtttctttatctctggttttgatagggttttcacaacatggtatgattggtgtaactcaaccacgaaaagtagctgctatatcagttgctcagagagtagctgaagaaatgaaatgcactttgggatccaaagtaggataccaagttcgttttgatgattgcagttctaaggtacaaaagtcttgttggtatttgtttcttttcttttatgggacagggtcttgctctgtcgcccagcctggagtgcgtggcgcaatcatggctctctgtagcctctaccttctgggctcaagtgatctcctacctcagccccttgggtagctgggactacaggagcatgccaccatgcccagctaatgttataaacttaacagaaagagtggagagagttctgaaagatttttaacttcaaagttcaatatatattttaaagaatttatttttgttgttcattgttaatgctttagctctcaagtgtctgatgttcatcccattttctccttccttagtttataaatgacagtttattttcttaggattctcttatttatgttttttaactgtaaggattcttgacatgtaggtttttaaaatgttttattgtagtaaaatatatataacttaaaatcgaccattttactattttggtatacaattcagtgccattaagtatgttcacaatgggctgggctcgatggctcacgtctgtaatcccatcactttgggaggccgaggcgggtggatcacctgaggtcaggagttcgagaccagcctgaccaacatggagaaaccctgtctcttttaaaaatacaaaattagctgggcacggtggtgcatgcctgtaatcccagctactcaggaggctgaggcaggaaaatggcttgaacccgggaggcggaggttgcggtgagctgagatcgcgccactgcactccagcctgggcaacaagagcaaaactccacctcaaaaaaaaaaaaaaaatgtgttcacaatgttgggtaaccatcaccatttctactttcagaactttttttatcatcccaaacagaaactcttatagattaaaacccccatttctccctccccctagcctctggtaacttcttttttttttttgagacgaagtctcacaccattgcccgggctggagtgcagtggcgcaacctccactccctgcaacctctgcctcccaggttctagtgattctcctgcctcagcctcccaagtagctgggtttacaggctcctgccaccacgcccagctaattttttgtatt[131 bp omitted]aatttgcctactccgggtacctcattcaagtggaatcacacaatattttgtacttcgtgtcactcttatttcactgagcatgttttcaggttgatttattttatgtgtttgtattcttgaagtcaatggaaagctgaattaacaaaatcagccaattaacaaaatcagcaagtgttaaagcatcttctatattcatggcaccaacaaatttaaaattttctttttaatagtgaatattataatttacattccctgtggatttcttaatcctgtccagctacaaaacgatccctggtttacatatgttccctaatgggaatggccatcaaatgtggcacaagatgactccccaaaatactatctttttgccttcctagtggtcactgttttttctttcttctttcccttgttttatggatgtcgttgctgttattcctaccctttggacctttttctcaccctgttttaatgcttgttgagtaacacatttttatttggagatagtgtcttactaagtcacccaggctggagtgcaatggcgtgatctcagctcactgcaatctccgcctctcaggctcaagcagtcctcccgtctcagcctcccaagtagctgggactacaggcgtgacccaccacacctggctaatttttatatgtttattagagatgtggttttgctatgttgtccaggctggtctcgaactcctggactcaagtgatccgcccacctcagcaacccaaagtgctgggattacaggcgtgagctaccgtgtctgacctaagtaacacattttttaatagagaagaggagagagtgggtggaaagtatgcacctaccattttctcatttcccccgaatcctctaaaataggggctgagtcagaaagataaatctcatttcactgttgtttcccacaacttgcttacccaatgccattgcatcatcttgccactttcctctgactttattgtatttccttattggtgatttttgttgctttgtccaagaatacccaagtgagttatttgtccctttttctgtatagacagcatgttttgtaacttaccatcattttgtatacataagttagactatttttatgtacccttttgtttagtcagagtggtttgatcacttaatgtttgtacctcttgaggaaaaatttagttgggaaaatagtggtgaattcctgtgacactgctgtttgaacattaggagacagcaatcaaatatatgactgatggatgtttactgaaacatattctgggagacccaaatcttaccaaattcagtgtcattattttggatgaagcccatgaaagaactctaactacagtgagtattttaatttattattatttttttattagcaagtagtttgtttgggtagctttttattgtgtagagaattgcctcctcttactttttaatttaatttaattttttagagatggagtcttgctccatcacccaggctggagagcagtggcacgatcatagctcactgcacccttgaactcctgggctcaagtgatcctcccatctcaacctcctgagttgctggtactgcagacgtgcatcaccatgtctggctaatttttaagaatattttttgtagagacagtgtctcgttttgtttccctggcaggtctcgacctcctggcctccgaccttggcctcccaaagtgctgggattacaggtgtgagccactgcacctggctcctacttatattttaatgtattaaaataggaattccttggttagaatagcagtgtatctaaaatagtttggctgttaagtgtacttgtgacttactagaaatttacttttctttcaggatatcttatttggtttattgaagaagctatttcaggagaagtctcctaataggaaggagcatttaaaagtggtggtaatgtcagcaactatggaattagccaagctctctgcattctttggaaattgtccaatatttgatatacctggaaggctttatccagtcagagagaaattctgcaatttgattggtccacgagacagagaaaatactgcgtatattcaagcggtattacttggcattcatttaatgtcttttttaaatatctatgattcttactaattgggtggtttgataattcatttgttcactactattttaatgacagtcctcacaggtcctagaacttttaagaaccaaatttaatttttctgtggggcaagggaagtggtggtaagggaatgactgtatttccactagcatattatgcctgcatttcttgctttagattgtgaaagtcaccatggatatccatttgaatgaaatggctggagacatcttggtttttctgactggtgagcattcagtatcaagttaaaaaacttaagtatttgtaagtaaggaatgtggcacccagatagagtgctacctctgttgggaattctgtgcccttctcaagtgttgccctagctttttctgattatctgaataattttaggtaaaagatagataaaaattgtaagctagctgccaaagaggattatatatatttatgtcaaagacatatgtttatgtcaaagacataatagtatgtatatatattttatgtcaaagacatagtagtatatgtcaaagacgtaatagtgtatatgtatatatacacacacatatatgtcaaatgtcaaagacatcaggctcattagtaaatatatgtaaaacacactgaccttttaatagaaagaaattaaatagtgaaatattgtttttgttggtctgtcttagatagaaatgtaacctgactaaacagacctgagttaattccattatttcaaaggacatttcaccaggttcttctttgggtggtggcattgtactgtgtgataacaacacataaggtgtagaatctatgtgtcgtagacaagcatgtggcatttttggagatcaaaaataaaatagttaaatcccaaactagtggcataacttttcaaatagcagcaccctcctaataggaattagtagtttccttgtttacctttttcctctgccttgtactaatgtcagaagtgagggattgtcacaatctttgcctttttggagattacttaagtattttgaaatttaaccaaatgcaatagcacctggactagcttttctcctttgttaacaatttggtgagtcttctcaaatacagggtgaaaagcttgacgatgataaatatttttattcctttagagatttaggtttcttagaaactgatgtttcttctacttcgaattttattgttgaaatatggtacagcttatgtgttcatctcctttacattaaatgagagatttacaataacttttaggcaaaattaattttaatcttgacattttctttatttttaaattaatttttctgttcagttgctgaagttatttttttcttcccattttaggccagtttgaaatagaaaaaagttgtgagttactttttcagatggcagagtctgttgattatgattatgatgttcaagataccaccctcgatggcttgttaatattgccgtgttatggatcaatgacaacaggtaatttctcattagaatagaaaatttgattttttaaaaaaactttttattgaataatcgtgtttacagaaaagcagtcagatcttaagtgcttaggtaagtttcacaaaccagtctcacctttgtaacccacatccagatcatgaaacaaatcagtgagaaccagcattccttgacagtagtgatttttgcctgaagtctttttacattcacttttttgagagtcgtggatatcccccttattatcgtttagagtattgtttctcccagcaaaacaaaactattggtgagaattctttgaaatgaggacagtagtttcttgctggtattactgtaagtcaaaacctaatttgccattgccacagaatttttagaaattgtgtatatccagctatatctaagtctaaacacagtggattgttttgttttttttttgtgatggagtctcgttcttgtcatccaggctggagtgcagtggcgcaatctcagcccactgcaaccgccacctcctgggttcaagcgattctccttcctcagcctcccaagtagctgggattgcaggcgctcgccaccacacctggctaagttttgtatttttttttttttttttttagcagagatgggattttgccatgttggccaggctggtttcaaactcctgacctcaggtcatctgcctgccttggcctccagaattgctgggattacagatgtgagccaccatgcctggctgtggatcattttccttttaaagtagccatgccttagtctgcttttcaagaatgatcctgttctttggtgaattccaagagcaaatgcaaactcttgatttgacattttggttatagtaaatattgttgaatgaggtttagaatttgttttataaaacttttattatggaatttaacttgtaaagttaaagggaaattaaccttagcctcctatttggagttggaattagcatttgaatgtttttatattttacatgtatgcgtattaacagcttttgttgattgggtgattcttatccctatattaacaaagttttggaatatatgtgtcagtaaagaacatagatgtgctattttggaaatcttttttatgatgatattagcttcttactctctattgaagcatagatatctattttagattttgtcatcttcagggaaattcttaggatcattgtttaaggttctcattgttttctcaagatttggttcaccgatgcttttataatttacattgaaactgataaaaacccattatgtttggtttgttattaatcattaactaaatatgtacatagacatatattattctatacagagtaaataatttcattcttttttactgctacattgaaaataat[144 bp omitted]gcctcccgagtagctgggactacaggggcgcgcccccacgccctgctaattttttgtatttttcttagagacagggtctcacca[132 bp omitted]caaaactcgagtttgacacatgcatgttgtaaattggtattttctttttatatatacttcagatcaacagaggaggatatttttgccaccaccacctggaattagaaaatgtgtcatatccaccaatatttctgcaacgtctttgacaatagatggaatcaggtaaaacttttgaactttctcttaaagtcaaggaagcctatcgttactaaacattagctaaacattactgagtttgcttttctgtgccctccactaattcccttctctcctactttttgatgttcttaacatgtaatcacctattttgttttgtaattattgattgctttgagcaggaaatggagtaggaggtacatactatattcctattcacactttttgtttttttagagacagggtctcattatgttgctgaggctggaatatagtgactattcacaggcgtgcagtcatagcacactacagccttgtatggagatcagccaatcctcccgcctcagtctcctgggtagctgggaccacaggcatgtgtcaccgtacttggctgttcacactttttaactacttggcaacttgaagcttcttttcaaatttaagattatgtataatgctttatgggtttcactaaataggaagccaaacctatttttctgtactcccattataagcatataccttagatgatttgatatttccttctaccttgcagcctcactcggtagagttagtttgtatatccagtgtttatctggatgtattgtctctgactttttacctttttgtgaaaattaactatgattcaggtcccttatcttttctggatgtagtaaatagtgctatcaaatttttgggtaaatttagtaaggaaacactaagaaattttaagtctggactgacaactaatgcaaagttctttaagactgggttatttatcatttaccgaatatattttatttctttagctaagtctgattgtctgtctccggaaggctgaacctgaatctcaaagatcctgtgtgtttcttctgggtaaaatgatcacccaggtctgagaggaagtctaatttcctctgcttttcttcgttactttaaaaataatggtttcactaagggattaagggagtgctctcctgggtaaattaacctctgtaattttctgtttcctgcacaggcaaaagccattaaatagcatgtttcagaatgttgtcttgttactgctatcctactttggttccttacctgacttgttcaccatttaattggcttagaatggcatgttaagggctagttgaaattagattctgaatctgtttaaatggtctgaagctgactttcaagtttgtgtatttttgtattgaggcaaaattcacataaaattaatcatttaaaatgaaaaattaagtagtacttagtacatttacagtattgcgcaaccactgcttctgcttagttctaaaatatttcaacacctcaaaataaaaccccatacccattaagcaggtactccacattcccctcttgaccccagcccttggcaactaccagtcttactttttgtttgtacgtattttcttttttaaaaaattctttagatgtgtcagcaggaagcagtaggtattttctattctggatatttcatacaaatagaatcatataatatgtggccttctgtgtttgctttctttcacttagcataatatttttgaggttcgtccacattgtagcatgtatcagtacttcattcttttttgtggctgaataatattgcatagtgtgtgtgtgtatatatatatatatatattccattgtgtgtgtatatatgcgtgtgtatatatactacatacatatatgcaaagcaatttgttcatcccttcttccattaatggttaatggacatttaggttgtttttaccttatggctgtgattcatagtgctgatatgaacattggtctataagtatttgtttgagtacttgttctcagttctttttggtgtacacttagaaatggaattgctggatcatatggtaattttgtgtttaacttcttgaggacctccgaacaattttccacctcggctgaaccattttacattcccaccaacaacatacgagggttccaatttcttgactttcaagttttacacttaacataaaaggcattgtgtacctgctagtttgctagaaaaggagaaaccaaagtggttaacaattaacaagtcttcttttattttccagaaacttaacttgctttgattcttcttagatatgtggtagatggtggcttcgtgaagcagttaaatcacaaccccagattagggttggacatcctggaggtggttccaatttcaaagtaagtctctatgtcaaatctttttattcaaagaacaactgattaggtaatttctagctgttttggggagacaaagtaaattacctgagaaacccacagaacattttggggaatttttgggtttttttccttttgtaggagcgaggcattacagcgaagtggccgagctggcaggacttcttcaggaaaatgctttcggatctatagtaaagatttttggaaccagtgtatgcctgaccatgtgatccctgaaattaagagaactagtttgacatctgtagttctgaccttaaagtgccttgccatacacgatgtcataaggtatgtagacaactagaaaaaaaaggaaaaacttgttagcctggaaccaagttattggctcaaaaattattttgaaatatttgactgatacatccctgagagttgaggctaacctcttttacaggttggtttttatattggttgcttttcttttctttttttttttttttttttttttttgagatggagtcttgttccgttgcccaggctggagagcagtggcacgatcacggctcactgcaacctccgcctcccgggttcaagcaattctcctgtctcagcctcccgagtagctgggactacaggtacctgccaccatgcccagctaatttttgtatttttagtagagatggagtttcaccttgttggtcaggctggtctcgaactcctgacctcaggcgatccacccacctcggcctcccaaaatgctgggattacaggtgtgagccactgtgcctggctctattggttgcttttcaactaaactaacacagaagacttccttgcattgctttagtaggatctcttgctcatgtttaaccttggcttaatggcggggttagggggttgtgctgatgtttatgtggatcacttagtgaccactgtttatttgtaatgaaaggtatataatgagctgggcataacagcttatgcctgtaatctcagcactttggatggccaaggtgggagggttgcttgagcctaggatttcgagacaagcctgggcaacatagtgagaccttgtctctacaattaaaaaaaaaaaaaagtctgatatggtgcatgcttgagtcccagatatttggaggctgagacgggaagattgctggagccgggcaggtagaggctgcagtgagccatgattgcaccactgcggtccagcctgggcaacagagtgagaccctgtttcaaaagaagggggctgggcgtggtggctcacgtctgtaatcctagcactttgggaggccaaagtgggcggatcccttgaggccaggagtttgagacccgcctggccatcctggcaaaaccccgtagctactgaaaatataaaaattagctgagcttggtggcacgtgattgtagtcccagctactccggaggctgaagcacgagaatcacttgaacccaggaggcagagactgcaacgtgccaagatcacaccactgcactccagcctggtcaacagagcgagattctgtctcaaaaaaaacaaaacaaaacaaaagggtatacagttggaaagtggagtgttttttttgtatggccagcatcatactatataccatgaaagacagagtaatactctgtagttttttgctttcactaagcttaagttatattaggaaaacaaggttcagacacgtgaaataaaggaagaacagttaaattagccaaatattaatataatttattggtataagatagaatattgttatagatagaaatttctatcatacatggtaggggaattaatggaggaaagtactatcttctttattttggtcttaattgccttggaatgtaaaactgctcaggaattttgggggatggtaaccgtgcagttttta[146 bp omitted]ctattaaaaatacaaaattagccaggatggtggtgctcgtctgtgatcccagctacttgaaagcctgaggcaggagaattacttgaacccgggaggcagaggttgcagtgagccgagattgcgccatcgcactccagcctgggcaacaagagcgaaactctgtctccaaaaaaaaaaaaaaaccaaaaaaagcaaaaaaaaaccccaaaacccacaaatactcattgtatactcttggaaagccaatttgccaatttcaaaatgttttgatagttatcattagattagagattttctgaatgagaatatgtagatactggaaagagaaaagcatgtaataaatgaaattctgactgtagcaataaattataccaatgaaaagaaggaaagcgccatttaaagaaatccaaagagcccaatagaaaactttcagatgaacccagatattaaaataatgtcttgatttttttcatttggggaaaaagggccatttttggaaatagctgctcagtaagtttgacattgactcttagtatattcacaaaggatagcagagcagcctctaaccaagaatgagtatatattagaaaaataggaacaataattaatatcatctgcattgaattatttttccatcttaagtcttaaaagccatagtgtactaaaaatcgcaaaattatgtttcaaaatgcttgaaacaaaaaacaaagacttcctttttaaaaagttgtataaagaataaggagaggtagagccagtgtttggggtagatggtataggattcatagacgacagaaagaaaatggatcttctcaattattattttgctttccctttcttttccatcaggaagaataattttaaagctgaaaatgcaagaacaggtctgaataagaaggaattgatgactaaggtggaaggaaataatgagggaaaacctaccaccataagtgattttgtcttgagcatttagacattatttccgtggtgttaaaagaacttgcagatttagcgtcagagtcactgtaggtcatctatgagaaattatgcagaatacgttatcagaaaatggtgagaaaggcaaaagtcttaatttttttcatttggtaaaaagggcgggttctggaaacaactacccagtaagcttgacattgattactagcgaactctagtacagtttattgaaaaatggtttaaggaaatttaatgacgattaatgagtatgaattttaaaagttcacaatgaatatgtcattttttgttgttgttgtgtttggttttggttttctgaggcaggatctcactctgtcacccgggctggagtgcagtggcacaatctcagctcactgcaacctccacctcccaggttcaagcgattctcgtgtctcagccttctgagtagctgggattacatgcgtgtgccaccatgcccggccaaatatgtcattataagccatttccttttcagtttgaggacaggaccgtccacataatgggtgctccacaagaatttattgaaatttaacctaatgtcttttattttcagcacagtatttaacaatactgcatttgatatcttgtgaataaaaaagtagtctgtagatgacagtactgctgagtatagttgccagatagcccagtctagaaaagtattaattaattgcttagtgtagactagatgaagtttttactggtattgtgctgaacttagttttttcttgataaacatttttaatgatactgaataaaaatattgaagttatgattatatttttctggaaaatatcttaatatctaataggtagatgaccaagctttaaaatgactttaacagattagaaccatgggcaaaaatcaacagggtgtaaatttgaaaggatatatcttatatcctgtgtttgggatgtacaatagcaaatacatgtggtagagatctgaaattatcagatcatcacaacct[227 bp omitted]gaggcaggagaatggcgtgaacccgggaggcggagcttgcagtgagcccagatcgcaccactgcactccagcctgggcgacagagcaagactctgtctcaaaaaaaaaaattttttttttaattccactggcatagactttggttacattaataaactaggtgatggggaattacagcgttcctgttatgtgttggtcactcaacatttggagttcagttttggatataatcaagttttatgaggagtttgacatactagtgtttttagagaatggtacttaggtatggtagatctcttagaaaccaagtaacttataaggagtggttgacagaattggtaattggaggaatcaaggggggaaattaattgcaatattttagaataagtagtttttccttttatatagaagaagcagctgactggtttggtattgctctagcacaagggtggcaaactgtggtctaatctcactgactgtttttgtaaataaaatgttagaatgcagccatacccatttgtttatgtgtggctgctttcactgtaatagcatggttgagtaattgtgacagagaccatatggcctgcaagcctaagctatttactatctggccctttacggaaaatgtttaccaattcttgctgtagaagctaccaggacctattggtacaaattgtaggaaagctggcagtagaacagtgtaagagattattgtttgcttattattttttctttttataagagatgggatcttgctgtgttgcctaggctgttgtcaaactcctgagctcaagcagtcctcctgcctcagcctcccagagtgctgaaattataggcgtgagctaccatccttggccttgttttatttatttatttttaaatagggttatcaatcctggaatggacattttatataaggtattggaccttttgtcttctattggatttttttcaaggtgagaagttggagtagatgatttttcatatccagatttaaggtggaaaaaataacccagtgcagatgatatcaagtaattatttttcctgtttttaaaaaatatatattcatgtttgatgatgctatcccttttgaatattattgttaattgttaattttattatatttattaatagcgcattatggtgatgtaagagaatgtccttattttcaggagatgcatgccgagatagttgtaagtgtgcaatggcattgtatttgcaacttattctgagatagtttggcagaaaataagtacatacacatgtacacatatgtgacacaaatatggctaaattaattgaatatatttccccatttatatgaaagcattttgtccggccgggtgcggtggcttacgcccgtaatcccagcactttgggaggctgaagtgggtggatcacctgaggtcaggagtttgagacaagcctgaccaatatggtgaaaccccgcctctactaaaaatacaaaaattatctgggcatggtggcaggtgcctgtaatcccagctactcagcaggctgaggcaggagaatcacttgaacccaggagacggaggttgtagtgagccgagattgccacactgcactccaacctgggcagcagagtgagactccgtctcaaaaaaaaaaaaaattaaattgtatttaagaagcattttgaggctgggtgcggtggctcacgcctgtaatcctagcactttgggaggccgaggcgggcggattgcttaagcacaggagttcaagaccagcctgggcaacatggtgaaaccctgtctctactaaaatacaaaaaattagctaggcgtggtggcatgtgcctgtagtcccagctactcgggaggctgaggcaggagaattgcttgaacctgggagatggaggttgcagtgatcagagatcgtgccattgcactccagcctgggcaacagagcgagactccatctccaaaaaaaagcattttgaggtactattgaacaatttataattttcagtactaattaatatttctctactattaatatttctctactatttttataaaagtttggaaaaaaattatggactgcagaaaagagtagacttgacaggctgtgaaggatgggtggggcaggattaggataagtagactggtgagagtatttcagctaaggggagtcaaaaagaatcacttcttgaagtagaggagtgtgattcagaaaaaaattatttcctcttttgccaaatgctgatcatgatcatataatttttttttagaaaaagaagatgacttgaaaaatagaaataaaaccttttaaagaaattttcgtcatgtctatataaaatcctaccatgttcaaggaatgcctctcacttcatatctcatttaaacacacaggtttccctatttggatccacctaatgagagacttattttagaagctcttaaacaactttaccagtgtgatgctattgacaggtaaaaaaaaaaaaaaaaaatcacaatcaaaacagatattgatctctttttaaacagggctctaaatacctttctctaacagtagaaaataatttctttaaattgaatggattgttag[174 bp omitted]cgtggtggtgggcgcctgtagtcccagctactcgggaggctgaggcaggagaatggtgtgatcctgggaggcagagcttgcagtgagccaagatcatgccactgcactccagcctgggcaacagagcgaaactccatctgaaaaaaaaaaaaaggagaaagaaactgcacggtataatcccttttgtttaataaatattggtattatttaacaagtaatttctgagtaccatttcagtgctaagcattatgctggatacataaaaatgataagagagccagagtccttgttttcatgtttgtgtgatggggtggttaggtttgatattaataattattattctcttggatgtgcgtggtggctcacgcctgtaattccagcactttgggaggccaaggcgagcagattgcttgagcccagttgttcgagacaagcctgagaaacatagtaaaacccatctctactgaaaatacaaaaattagccgatggtgttggcacatgccagtagtcccagctacttgggaagctgaggtgggaggatcgtctgagcttcggaggtgaggggtgcagtgagctgaggagattgcgccattgcactccagcctgggagacggagcaagaccctgtctccaaaaaaaaaaaaacggtaaaattgaaaaaataaaattattattctctcatgtcttcaaagacatcttctttttttttgttttttgagacggagttttactcttgttgcccagactggagtacaatggtgcaatctcacctcactgcaatctccacctcccaggttcaagcaattctcctgcctcagcctcccaggtagctgggattataggcatgcaccaccatgcccaggtaatttttttatattttggtagagatagggtttc[132 bp omitted]tttgagtgattctcctgcctcagcctcccaagtagcagggactacaggcgcatgccaccacacccagctaatttttgtgtttttagtggaaacggggttttgccatgttggccaggcaggtcttgaactcctgacctcaggtgatccacctgcctcagcttcccaaagtgctaggattacaggcatgagccaccacgcctggcctaattttcttaaattgaattgaacttctggaggtgattggaggtaacgtaaattatatctgatttattctgaatgatgaatgttacatttgtactctcctagtgtagaaagacttacaaactttttctttgtattaaggagtggccatgtcaccagattgggtttgtctatggtggagtttcctttgcctccacatctgacatgtgcagtaataaaagctgcttccctggattgtgaagatctactacttccaatagcagcaatgttgtctgtggaaaacgtcttcattagacctggtaagatgtttattttaagttgtgttttttaaaactaatagacttggctgggcacggtggctcacgcctgtaatcccatcactttgggagggcaaggcaggtggattgcttgaggtcagaagttggaagaccagccttaccaacatggtaaaaccccatctctactaaaaaaaaaaaaaaaaaaaaaaccaaaaacaaaattaatagactttattttttagagcatttttaagtttacagaaaaatttagtaggaagtacagagggttgacattcatcccctcaacctcccacagcaatttctcctattaacatctttgatttgtatgacatataagttgcaattggtgagccaatattgacacattattattaactaaagggatcactctttgtgttatatggttttagctgggattataggcatgtgccaccacgcctggctaattctgtatttttagtagaggcgcggtttctccat[136 bp omitted]taaatagttatttaacagatagatcttttgtaaatattttctcccagtctgtggtttatcttctaattgttttgacattgacttttgcagagcggaagtttttatttttgacgaagtctaccttatcaattatttctttcatagattgtgtctttattgttgtatctaaaaaagtcattgtcgtacccaaagtcatctagattttctcttctattgtcttttagtatttggacgtacagttgttgcggtaccatttgttcaaaacactgtcctttttctgttgaaatgccttcgcttctttgttaaatatcagctgactattcttatatgggtctgtttctgggctctgtatcttgttccatttatctgattgtctgtttgttcttccaccaataccacactgtcctggttattggagctttatagtaactcttgaagttttgttcttcctcttcaaaattgtttaggccattctgggtctttttcatataaactttagaaccagtctgttgaaatccacaaaataacttgctgaacttgctgggattttttttttttttttttttttttgagatggagtcttgctctgtcacccgggctggagtgcagtggcctgatctcggctcactacaagctctgcctcccagattcgtgccgttctctcgcctcagcctcccgagtagctgggactacaggcgcccgccacaacgcccggctaattttttgcatttttagtagagacagggtttcactg[139 bp omitted]attaagttgcgaagaaatgacatcttgacagtattgtcttcctatccatgtacatggaatatctcttcatttatttagattgccagtaattcattgagcatttactgagggtttaccgtgccttagccctaggacagaaaactaaggataaacaagttttgttgttgttgtttttgagatggagtttcactcttgttgcccaggctggagtgcaatggtgtgatctggactcactgcaacctcctcctcccaggttcaagcgattcttctgcctcagcctcccaggtagctgggattacaggcatgggccaccacgcctggctaatttttgtatttttagtagagatggggtttcaccatgttggtcaggctggtctggaactcctgacctcaggtgatctgcctaccttggccttgggattgcaggcatgagccaccacgcccagcccggcgttaatttcctttcattagtaaaggaagatagtgcttttatagtacattagtaatttactaattttttttttgtaggatcaaaagaaaaggtagtttagcccttgcatccttagagaattcttttgaagtttccaggtctttaaacttctgcttctttcttttcttggtgtgtcagtataggacacaatttaatttgacatatgttagatttgttttcatgcagtggagtaattttttctttcaaggagcttccaagtgaacagtataccttgtctgcagccagacaacagaatgggttagctcactggctttatacctttgtaggctggaagtgtcgggtccagattaatttattattgccatgattataatggaggatacatttttctataaaaatactctaatcaatatactgtttcaaatagtttgcagtcttttttttttaatttaaaaaatttttaaattttattgagacaaggtctcactgtgttgcccaggctggaatgcagtggcgtgatcttggctcattgcaacctctgccttccaggctcaagtgatcctcccatacctcagcctccccagcagctgggaccacagatgcttgctactatgcctggctaattttttgtatttttatacagatggggtttcactctgttgcccaggctggtctcaaactcctgagctcaagtgacccaccagccttggcctcttaaaatgctggtattacaggcctgagccattgcacccagcagttgcagtctgaaatgtcagaattttaattctggtaatacccctaattgcaattttttgttctaataaaatgctgtataaaaataagtaatgttaactggttttcatgaggcagtatcagagctaaaaataccagtgggcacagtggtatcccagctccttgggagactgaggtgggatgattgcttgagcccacgagatcagggccagcctgggcaacatagcaagaccccatctctgataagaaattaaaaaataggccaggtgtggtggctcacacttgtaatcccagcactttgggaggctgaggcaggtgggtcacctgaggtcaggagtttaagaccagcctggccgacatggtgaaaccctgtctctactaaaaatataaaaattagccaggcgtggcgtgcacctgtgttgccagctactggggaggctgaggcggagaattgcttgaatccaggaggcggaggttgcagtgagctgagatcgtgccactgcactccagcctgggtgacagagtgagactccatccccaaaaagaaaaaagaaagaaagaaataaacaagctaaaatatttcaaaacctattacagagtattgaagtaggagttaagagtgcagggttctgtccagctccactactacctaattatctgaccatggccctagtttttctagatttcatttttcatttgtaaaaccaagaagttggattaaggtgaccaactctaatagtcttttaaggctagaaaaagaaaaatgttttttccatgttggaatatttaaatagataaaatcagtgtggtgttagccttttttgggtgacatttattcttatataatttcaaataagaatagcaaaggaattcctttataccttctatgcagtttccgcaatttttaacattttaccccctttgctttattactctgtctccctctatatatgtatatataaatggatttttttctttttctgaatcatttaagaataaattggaagcattgtgctcccttaccacaaaatatttacatctgtattaggcaagaacaagggcaatctctcatttaaccatagtacattaatcaaaattcggaaattgttttgttttgtttgagagagagtctcactctgttgcccaggcagtagtgcagtggtgggatcatggctcaccgcagccttgacctcccgggctcaagcaattctcccacctcagcctccttagtagctgggaccacatgcatatgctaccatgcctgactaatttttaaaaattttttgtagagatgaggtctccccatgttgcccaggttagtctcaaactcctaggctcaagcaatcctcctgctttggtctcccaaagtgctgggtttacaggtgtaagccactatgcccggcctaaagtttggaaatttaactttgatacaatattattatctaatccagaatccatattgaaattgtccattttccctagaatctacagaaagtagtttgagaattggtaagttacagtactgtgaaaaacaaccctatataactacagtttgatatttgtttacagttaattttaggtaaaatttacatatagtgaaatgcataaattttaggtgtataattcaatgaattctgtaaaatgcttatacccatgtaacccaagccctgtcaatatatagaacatttttatcactagcaagttccctcagtgccacttcttagtcagatatcactctacctacctttggttaaacacttttcttatttttttctgattagtttgcctcttctgaaacgtcatataaatagaatttttttttttcttttgagacagagtcttgctctgtcatccagggtggagtgcagtggcacaatctcggctcactgcaaccttcacttcctgggttcaagcagttgtcctgcctcagcctctggagtagctgggattagaggtccccgacaccatgcctagctaatttttgtattttcagtagagacggggttttgccatgttggccaggctggtctcgaacccataacctcaggtgatccatcagcgtcggcctcagccttccaaagtgctgggattacaggtgtgagccattgtgcccagcccaaaacttcatataaatagaattatacactctcctttcttgtgtctggcttctttcagtcaacataatgtatgttaaggtttattcatattgttgtatgtatgaatactttattctttttgttgttgactagtattccactttatgaacatacagttgtgcattatcctgttgatggacatttgaattgcttcttgtttagttctatttttgagtaaagttgttttgaacattcttgcacaaaaatttgaaggtgtttattttcatttttcttagataaggtaaatgcctaagaaagaaatttgctgtgccatcgagtaggtatatgtgaatctttaagaaactgccaaaccttttccctgaacagttgtaccatttaaaaatcacatcagcaatgtttgagagtacagcttgcactaaacacccctctcaacatttggtattgccaatcattttattttacacattctattatgtacctctttgtggttttaatttgcattttcctgatgactaataatgttgagcacttcttcatgtgcttattggccatttttctgtcttcctttgtgatgtcttttaaaatattttgcccatgtctttttatttttgagacggagtcttgctctgtcgcccaggctggagtgcagtggcatgattttggctcactgcaacctccacctcctggattcaagcaattctccttcctcagcctcacaagtagctaggattacaggcttgcatcaccatgcctggctaatttttgtaattttagtagagacgaggttttgccatgttggaggctggtctcaaactcctgacctcctgacctcaggtgatccgcccaccttggcctcccaaagtgctgggattacaggagtgagccaccatgcccggccccttgtcttaaattaaaaaaaaaaacaaaaaaactttaattcgtggattctttcttctgccagcccagatctactgttgagcccctctatggcagtttccattttgtttcttgtccttgtcaactccagcggtcagtcagtgattggtcggaggttgtacctagctaagccttttaatttaagccagtgatgttttcaccttttactgttgaatctgtgtttctggttaggagactactttcatggttgagggagttgatgaatttgtactgtgttcagccaaggagtcgaggctcagacattccctctctatttacttctcagaaggcacagctttgggcatgagaacaatcttctagaacaccaggaagactatgctcttagcaggtctctgtttccttcattgatttcttcattgaatttttggctggtctgtctctattggtgtcacagcaagctgttagtctccactgattgctagctgctggctctgttgtttttgacagtgcccagagcataaattgctccatagtcttgatccaaataaagttgggcacctcggcaggggcaaggtattgcccgtctttgataatcctttccccatcctttcctggaaacaatctctgtgctatggagcaggagttggagagggtggtggtggtaatgggggcctgttcttcagtggctctcctatctgggtcctccctaaatagcagaagcttggggttggggagttaggagctgatactgtggctcactttgcatcttcctcagcacaaagccttttgagatgcaatctctggatgttcactagttgcaaacgtacaaacctggaatagctctaggaaactgggagtagtgggaactaccactgagctgctgaacccattggaacaactcttctgcaacacagagctgtggggaatagaggactgcgtaggctgtcattatctgttatgctttgatcttccctaccgagtagcatttaggagtcagggaaagggtgccgctttcaggctgccttgaaggctctcgcatagcccttccacacacacagctgttgagagtggggcattcttcctactgtccttaccgaattccatagattaggcttgtcttaagcattttaatcaatctccagagactttgaatgattgtctttggtaattttgactagtttaatagatgtctctctagaaaagaagttttacctaactcctcacatcaccattcccagtacagttgacccttgaacacacaggtttgaactgtgcaggtctacttatttgtagattttttgttttttgttttttttttttgagacagaattttgctcttgttgcccaggttggagtgcagtggcacaatctcaactcaccacaacctctacctcccaggttcaagcaattctcctgcctcagcctcccgagtagctgagattacaggcatgtgccaccatgcccagctaattttgtatttttagtagagatggggtttctccatgttggtcaggctggtctcgaactcccaacctcaggtgatcctcctgcctcggcctcccaacatgctgggattacaggcgtgagccatgcactcggccaattttttcaataaatatattggaaaagttttcggagatttgtgacactttgaaaaaactcacagatgaactccgtagcctggaaataccaaaaaaattaagaaaaagtatgtcatgaaaacataaactatgtgtaggaaatgctgcaggataattaaggaatcagagagaccgaggggttgaggaggagttatttaattatttaggtgcaccaacccagttggattaacatccaaaggactgagccctgaacaaagagtcaagctaccttttaagcatttcgtggggcggggggagatctgtgcagggggaagcatattacagaagtgagaaacaaagacagttatttaattaagacgtgcattacattatttcttacttttcaaggaacaacatgttttacgacttgagattatctgtctagtgaccttgaagctgcacagctcgagagtcttcacaatgcctgggaaggggtgagataaggctcactagccacagagagaaaaacaggcagttaattttaaaggactccagctctttctcttcctcggggaattgggttttcttacatacaactgagtttttgcttatacagtctttaatttcttttaattcctgttccagtactagtctgttttataatttactaccataaaatatacacaaatctattataaaaagttaaaatttatcaaaaatgcatgcaaacacagactgcatggtgccatgattctagggattccaggaggcactgactcacaggtaggcttttctcctggtattgcgagccaggatggggtcgatgctggagtctagggcaatttgacttttggcatgatatcttctgggggatggcagttaggtgcttgaaatgaaatattttgggttaaaaattagtatccctggctggcgtgttggctcaagcctgtaatcccagcactctgggaggccagggcgggcggatcacctgaggtcaggagttcaaggccaacctggccaacatggtgaaaccccatctctactaaaaaatgtaaaaattatttgggtgtggtggtgtgtgcctgtagtcccagctacttggaaggctgagacaggagagtcccttgaacttgggaggtggatgttgcagtgagccaagattgcaccactgcactccagcctgggcagcagagcgagactgtctcaaaaaacaaaacaaaaaacaaaattagtctcccggagcagttcaagaaatggagattaataatcatttatatcttttccttaccagggtcatttgtatgtttgtatggtctgagataaatcatattcttttttatttttttgtctctagctgcttcattcagttgctacctaggtaacatagttggaagctacttaaagcatgggatagaagactttataccttcatcagtgttttctttaatcaaattactttcctcctagtaacaggaactgctgctttgcagattcacatcgtattctatagtaaatgctgctccctggattcaggcaacattgtgcctctgctagatctagctgtgataggtatagggaataggaattgtgatgtgacgtgttagattgaaggaaaggatccctatgcagttttgaaaaaatggcactctgaaagattagccctggataaagtgctgtatggggaatttgggcaatcagagagcacatgagtcctgaatgggatcaggggaagtggtatcgaagtaattaacagataaatctcaaaaacgtaatgttgagcaagagaaaacagacacatcaagtacatactatacgattcatttatacaaaggttaaaaatgggcaaaacccatctgtaggattagaagtcaggatatagttattcttgtggaagggaatgggtagttactcgaaggagggcataaaagggggctgttgagatgctggtgatactgtttgttgatctgggtacattggtatgttgtgtttgtgaatattatatgagctacacacttacgtcctgtgtaattttctgtatgcatattatacttcaatattacattaaaaaagaaaatgttcgtagtaggtcagttctgcatatatggagatcatgtctaattgcccataattgggaattggataaataagaactggttaaattgtgttatgttccccatactcctggggaataccatatcattgtttttttctttagacaaggtttcactctgttgcccaggccaaagtgcagtgatgcgatcacg[211 bp omitted]gaggcaggagaatggtgtgaacccgggaggcggagcttgcagtgagccgagatcgcgccactacactccagtctgggcgatagagcgagactccgtctcaaaaaaaaaaaaaaaaaaacctcctgggctcaagcgatcttcccacctcagcctcctgagtagctgggactacaggcatgcatcaccatgcctggctaatttttgtatattttgtagagacaggatcttgctttgttgcctaggcttgtcttgacctcctgggctcaattgatccacttgccttggcctttgaaattgctgggattacaggtgtgagctaccacacctggccctatattgctatttttgagaaagaataattctatatgtactgatatggagttgttattaaataaacaaattttcagattatatattccatttatagaaaaatgaaacactatgtacatatgcttatatatacatagaaattacctggaaggacacacactaaataatgaacagtactttgtcttgaggattggtttatgggtagtgtgactggggaacattgaacttttacatgatattcttttataccattacatttttttttctgtaagcatggattactcttataacaaaactaatttaaaaagtaaattacaaatactatttttaaaaggcaaatagattgggagaagtaatgttgctattcaggtaaaatctccaaagtgatatgaaaagaaaaaaaggaattgtgggagaaatagagcttcctaagagaagttaagaagagttaatatagttctaccttacttcaccccagaggatgaggcagattttaatgagtttctgaaagcaaagtgattgtaggcacttaatgcaaagtataactgaattgcctctccaattcttttagttgatccagagtaccagaaggaagcagaacagagacatcgagaattggcagctaaagctggaggatttaatgactttgcaactttagctgtcatctttgaacaatgcaaatcaaggtatgtaaggtagtcctttgtcctgaaaaatgtcaatttgatgtatagttccaatacgtacttatgatgtggcttgtgacactaacgttcagtgaagatgatattgacttcaaggtattttgaatttcagtgaaattatctatgtcagatgactattgcttagtaggcatttattatataacattgattctcttcttttctcctcaaacctttactgaaaatgaccttatagaattttgcttctatataggtagcctagattaaaaaatgattggatatttgttattgcatatataagtaaagaaatccatttacaaattattttttaatttagtcaggggcacattcattaatttaaatgtttttttcaagtttcctaaaattcttttttagtacttggacaggtctcctgaaggaactgacagttgtttatgggtttccacttttgtaatagaaatgagaattttagattgtcttttacttagagaagatattttaaagataccagttttttgttttgcagtggagctccagcttcatggtgccaaaaacactggattcattggaggtgcttattttctgcatttcgtgtggaagctcaacttcgagaactaatcaggaagcttaaacaggtgattgccgtaatgttttttttcttgagtagcattttggacctatatatttcatattgaagtttcattgatgtacattagcaccctttctattctaccacccttccattctatttgtttctatgacctccttgaccccatgaaacattcctagtagtgataaaagaattgtcttcacagaaatgaagatatttaaaaattgctttcctgatatataattgacgtgtgataacctacacatatttaatgtatacactttgatgagttttgacatttgcgtaaaacaactatcaagataatggtacatatccatcatctcccagttttctcatcctcccccccacctttttttttttttgagatggagtctcactctgtcacccaggctgaagtgcagtggcgtgatctcggctcactgcaatctccacctcccaggtttaagcaattcttctgcctcagcctcccaagtagctgggattacaggcttgcgtcaccacacccggctaatttttgtagttttagtagagatggggttttgccgtgttggccaggctggtctcaaactcctgacctcaagtgatccacctgcctcggccttccaaagtgctggaattacaggcatgagccactgcacctgtcctcattccctttcataatccattgtctcacctactaggccctcctgccccaccaacccaggtaaccactaatctgctttctgtcatgatacagtaagtcctcacttaatgtcatcagtaggttcttggaaactgtgagtttaagcaaaatgatatacagcaggccctagaaaaatattgttttattcaccattgttttaacactgatgagagaaaaaaaaaaatcttaaaaattttgcttaactttgcagtttttaagaacttatcattgacattgaagacttactgtatataagtttgcatttcctagcattttacataaatggaatcaaacagtatatgctcttttttttttggtctggcatcttttactcctcatgattattagtttttcaatttatatatcttattttggtaaaataattaatataaaatttacctctactgggcattgatgattaacccctgtaatcccaatgctttgggaggacgaagtgggaggaccacttgaggccaggagttcaagaccagcctgagaaacagtgagaccctgtctctacaaaaaaattaaaataattagcttgttgtgttggcacacacctgtagtgctagctactcaggaggctgaggcagaaggattacttgagtccaggagtttgaggttgcagtgaggtatgatgccactacactctagcctgggcaacagagcagcagcaccctgtctcaaaaaaatttttttttttttttttttttactgtttttatgcgtacaggtcactgcacacttaaaacatttacaatgttgtgcagcccttaccacttctccatctccagaacttttttttatcatcccatactataataaaactccataaccattcaacaataactccccattcccgacagtgcatggtagctcacgcctataatcctagcactttgggaagccgtagtgtggggatcacttgagcccagcaagtttgagaccagcctgggcaacacagtgagaccttgtctctactaaaaaaaaaaaaaaaaaattagccaggcgttgtggcacacacctgtagtgtcagttactcagcagggtgaggtagaggattgcttgagcctaggagatccaggctacagtgagctgtgatcacacaacttcactgcagcctgggtgacagagtaagaccctgactcaaaacaaaaacaaaaaaacctacccattatcttctttctccagcctctggaaaccactgttataatttctctgtttcgttatgagtgttttctgtttgccttatcttaaagttcattaatcttttctcctgcagtgtctagtctaatctgccattaatcccatctagtatatttgtcatctcaggtgttgtattttcatctctagatgttggatttcagtctttaaatttttacattttatttttcaggtctctactttttgaacatatgtaatccagctatacagaaaattataataaaatataattagatctgtgtcagttctaggttgattttgatagatgtcctcattatggattgtgtttttttgcttctttacatcatacctgataatttttcagcggatgccaaacattgtgaatttcaccttgttgggtgctggatatttttgtgttctagttacttggaaatggtctttggtctttcttgttgggtcttgcttgcatgatttgttaggtgggatcagagcagtgctcagtgcagggctagttattcccctctactgaggcaaggcccatctgagtactcttcctaacatcacatgaattactgtagtgtagtattctcatgtggcttataggaacaggcgccattactagccctgtgaaaacaccatgcccttacttatccttttaagaggttcttttcttgggctggtagtttcctcacattcatgtgctaatcactactcagctcaacacttgaggaggaccttctgcatctctctggagttgtgtctttgtgcacttctcttctctcctgaactcttgtcctgtgaattctagccaccttggtcttcctggactcccagctttctctccctaacccagggagttctctgagttccatttgggctttacttccctgtaccttggtctgcagtctttatcaaggctgaagttggggcagttgttgggcgtactgcgtttatttcctgtctctgtcctttattgcctgatattacagtgttttggaaatcattatttcatgtattttttccatttttttggtttcaggtggaagggtaaatctggtctctcttaatctatgttggccagaaacagaggtctttagaaatgtggatttttcaaaataaaagattatttcaaattgtactatgagatttaccactctctacatattctttttatagcaaagtgatttcccaaaagagacctttgaaggccctaaacatgaagtactacgaagatgtctttgtgcgggctatttcaaaaatgtagctcgaaggtaagcaataaagacttgagagatggatcaagatataatactgtatttgactataatattggactatttaatattaaacattgaagatttgatttaagctctgtgatgattatgacatgaattacagtgacgagggagagctacagtgacgagggagagctgcagtggctcagaatgtggtattagagctcaagtagggtaggaggggtatgtttgtagggtggctgtccagcatgggttatcttcacttaaggcaagtaacaagagttttctttcagagaggtggccctgtgtatagtgtgaaagccaagtaggttgagcatagcatccctgaggaagggtagcttggcatggagtgctagggcttgagcaaggtggggaggggttatttggtttggggcatcagtcagagtgtagtgaggaaggcatctttatagagaaaggggtaacagtgatggtgatggagattcattaaatacagaggaattgaacacataactctgtgagtgataatggtgaagggagttagaaatagcgaaagtgagaaaataggaatgatctctgtgctgttggattgaaatttcagtgtatcatgatgaagttatgggtttcattatagatggatgcatggatggacactggaataaaaatagatgttagtgtgtgtatatagaatgtatttgtatgtatgtaaatatttatatgtatatatgccctagctctgagataataacaatgaatagacatagtgcccagatcttgacttgggacatccatctgccacttaaaggagtcaggggtctttggagaaatggggctgggaaaatgcaagatgagcccagaatatcttattttgccagcaagtaaagaagtgattaacaaaggttgaggccacgtcagaagaacataggagccagcatgaagaggccccaagtaatcaaatatgagacactttaagcatcaaaataagtagtgatagtagcggattattatgcacttaataaaatgtgaaatcgtgtctatcgtggtataaataaatgagtaaaagtttattgagaaatggaattgtttacaagcacctctccataaaatttttgttaattacaaaagcaaaaagtaactttacagtggagaatcctggcatatgtgacctaaatcaagcaatcaaagtgaacataatgaaataaataaaaatcatgttcttcctgataggatacaatgagaaaaacacagcattatgtctgtgatattcctgctaaagatgcataacctgaatctaatcatcctgaaacagacaaactcaaactgagggacataccacacagtaactagccttgacatctttaaaggtgccaagatcatgaaagtcaaagactgaggaagtattccagaatgaaggagaccaaagggaaatgaaaaataaaggcaatgtatgattctgaattacatccttttgctataaaggatattattaagacaaattggtgaaatgtcagtggggtctgaggattaattgttagtaatgtatcagtgttaatttcctggttttgatggttatagtcatgtcggagaatgttcttgattgttgattgtaagaagtgcacagtcgagtatttgaggatgatggggtattaggttggcagtttgctgtcaaatgattcaggtaaaaatttttttactctcaacttttctgtaaatttagattgtttcacacttttaaaaatatggtatatcttggttaccctctgtatgccaaacactgggcaggtactaaaaatagaaaagtagagtaacatgagtccttacatcattcttgatgatacctgagtctaatggagggtacagatatgtaagtgaataattacagtgcagtctgatctgggttatactatgaatatatacaaagtactataggaaataaattatgacaaatgaactaggtttatttttttgacaagttttttggaatgacatttaggtagggtaatgtagaagaaaataagggcatgaatcggaaaaatgatagattaattgtcaagttttagagtagtgaaaaaatcatccctttaaaaagagatgcagcatagtataacataaagaaaccatatttaagtcagaagaactgtttaggacttggttttaccatgcgttagcgctggtgatcttgagaagtctagctaatttatttgaattttagttttgactttttaataaagttcctggctctcaaagctcatagattattgttaatatttgtactgattccttatacctaattgtagtgacttatacctaattgtagtgactgtttaacctgtataattaatttaagatgaattggtagagagcttgtagtgacagttgaataaatgtaaacctctgcttataatgctgtttgtagtagaacatattgtaattgttcattgctgaatgtaatgctccatttacttcattgctttactgttgtagtctttatcattttgtttttctgtttatagatctgttgggagaacgttttgcacaatggatggtcgtggaagcccagttcacattcatccttcctcagcagtaagtacttcatttttaataaagggaagaaatttgtaaagttgtagaaataagtaatatacaaatgtcttctacttttcactttggagttaaatttacatatatctatattacatagatctataagggtattggttggcctgtgcctcctgtttgaagaagataggaattaattgagaaggatttggactatttggttggtttaatgtggaatagggcaggttattgagttaccatcattaaaagaaatgttttgtatagcttcatgaacaggaaaccaaacttgaatggatcatttttcatgaggtattggttaccaccaaagtctacgcaagaattgtatgcccaatccgttatgaatgggtaagagacttgttacccaagttgcatgaatttaatgcacatgatttgagcagtgtggcccgacgtgaagtgagagaagatgcaagaaggagatggacaaataaggaaaatgtaaagcagctaaagggtgagtaaatcatttgttctactcttaaccactatgccatactgcttcccagtagtacttcactatttttgtttataaaaatgttgtgacccacctgggcaatgtggtgagatcccatctctagcaaaataaaaataaaaattagccaggcatgttggtgtgcacctgtagtcccagtgacttgggaggctgatgcaggaggatcgcttgaacccaggagtttgaggctgcagtgaactgtgatttcaccagtgcactccagcctgggggtgacagagtgagacactatctctaaaaaaaaaaaagtgatgatttatgcattattaactcagaatcccctttgtttccaaggggctttttctttctttctttctttttctttcttctttgagacggagttttgctcttattgcccaggctggagtgtaatggtgtgattttggctcactgcagcctctgcctcccggttcaagctattctcctgcctcagcctcctgagtagctggattacaggcatgcaccaccacgcctggctaagtttgtatatccaaggggctttttctatgaaataattaggaccctggttgggaggcataaatagttgtggtactgaaataggacagaaagtttttcagctcacatacacagaaaacttcttagtaaagctttttgaggctgaatgatgaagcatattgtattttctttatttgacatcactgcaaaatggaatggtgaagagttttgccgaat[185 bp omitted]gtggcgggcgcctgtagtcccagctactcgggaggctgagg[131 bp omitted]taggtgttctattacagtgtaataacactgccacatgcttgaattagggtcagtttttctgactcattggccttggtgctcttaattttgtaaccatagactacattgcttttgaaagggcaaaatttaatttttctctttattgtttttactttgttaacactgaaaaatcagggcttctctttctcttaacatttctagtactgaatctcaaagctaagttttattggattaatttgtaatgttttcagatggaatatcgaaagacgtcttaaagaaaatgcaaagaagaaatgatgacaaatccatatctgatgcacgggctcgtttccttgagagaaagcagcagaggacccaggaccacagtgacacacgaaaggaaacaggctaaggtggtgaaccctccaattcaggaagtgggaaaaggagccaggaaatgtgcttctactttgccagttatttcagacagcactaccaagaggaggtggtcagcacttgttattggcctatgaactaaaagcaaatcaaagctcataaatcaaagctcatcagttcccataaatgcagttgtcaaagaaaagatttggttgccatagtcataagcaatgatacatgaaaccaatgaaagacagtacatgtaataatattttcctcagtacaattttgctggccttaactggtatcaaacgctgtcattgagatgttttcaaagaacattgagttgtatttaatcagcgtgtactccatttgcattgaagcattaaaaattatttttcttaaaatctctttaaggccttcttgttgctgttagaatagtgctatatatcaggtatgtgaccatttatttcagaaggctgaacataagaggtttctactcagcaatacttagatgtctaactgtttaattgctacagagctttatagatatttagagaaaagacttaatcaattagtaaataaaattgcctatggcaggattctttcttgaattaatattaatccttaaattgatttttctgggattatacaaattcctttttatataaaagtatattgtttaaaacagtagctatagccattaaccaaaggacagatgatatatatatatatgatatatatatatatataagttcttttttagctgtacctacgtacttatatcagcaccatgtatgtaggtgtgatagtactttcaaacagcgcctccacctggcctactctgttatttccacctgtttgggtagggccatttaacttccattatgccaaacttgggatgggattttcgaagcagacaacactatttcatcgtgtttcaaattggaaccttgaggctagttagtatcacactcaggccacactcagcacttgcccactcttgtttactgccttgtattctagttatttgtgtatttgtctccctcactagattatacgctccttgtgggcagggactgtgtcttttttcatctttgtatctttcatgcacctagcatagtgctttgcacatagtagtcactcagtgtttgttaaataaagctattagtgtcattaaaattcaaaagacagtataatgtgtgtttttagatattttgtgtaaaaattaagaatctaaattttttatcggtaactcttctagttatttcctttggaatctagttttatgttcaataatagaaacttgaaatctttatcaaaaatcacaaggacccaaattcatgtatttgtccctaaagtaaggtgagtgatgatggtttctctaaacctttccagtgttttaatttgttaatttttttttttttttttttgagacggagtctcactttgtcgcccaggctggagtacggtggcatgatcttggctcactgcaagctccgcctcccaggttcacgccattctcctgcctcagcctcccgagtagctgggactacaggcatccaccactatgcctggctaattttttgtattttttagtagagacggggtttcaccgtgttagccaggatggtcttgatctcctgacctcatgatgcgcccgcctctgcctcccagagtgctgggattacaggcgtgagtcaccgcgcctggcctaatttgttcatttttatctttagtgctctagacactgttattagcacatattaatcatttagttctgtcagtttctcttctcaggtgtattgtataagggcatatcctcagatgtggtgggagtgtgtggattcttggaatgagagctcttctagtttagtaaatattaagcatatattctgaatctacacctcacactcaaattatatctgttgtttcagtaatgtcctttatggcatttttctgtagttcaagatttagtctaggatcacgtattgtatttagtctcttaatctggaaaaagtcctcagtccttgtctttcacaacattaacattttaaaataatataagctagttattttatagaatgttctcaatttgggtttctccaatgtttcttcatggttatgcatttttaactggaatactgcataagtaatagtgtcatggtatcacgtctggaggtacatggcattttccccttgctggtgttattaatgttaattacttattagggtgctttttaaattatatcaacctggttatccttataattcataaataatttgagggagagatactttgacattatataaaatatctcgttcctcataaaatatgacattttgtatttaccatcaattgatgattcttgcctgaatccattttattcttatggctgcaaaatggtgatttttttttctaattcttttctatatttgttggtattatattgtaaggaagagttttccttgaaggatgaatgtctgataaacgggtgggtgctaagaagagcatggatcaagacagagaagtatttatagaaagcccagggggtgtttgagatggtggcaaacagttgagtttacttggtgcatagaatatatataggagagtaggtggctcaaactgttaaggtcagattacagaaggctttgtaaaccaatctatagaatttggaattattttatggatttgttagaagggaaggacatcattacagttttgggataattgtgatagtgttattgataaaaaatttctgtatctcagtttgcattgagaggactgtgagagcagtagtatcaagggaatgctggatctagttaaggcaagaacatggaagcagccttgcaggaaaggtgggttttatggaggagtttgttcttagaagaatgggaatacaccttcaagttactaaatgaaacaaaacagaatcaaaaacaaatttttttttgagacggagttttgctcttgttgcccaggctggagtacaatggtgcgatctcggctcaccacaacctcggcctgccgggttcaagcagttctcctgcctcggcctcccgagtagctgggattacaggtgcgtaccaccacgcctggctaatttttttgtgtttttagtagagacggggtttcaccaggctggtcttgaactcctgacctcgtgatctgcccacctcggcctcccaaagtgttgggattacagacatgagccactgcatccagctgacaaatgttataatagaaaaatgggcaaaggacatggtcggtccttttataaaaggggaaacaggaggaagggtcagtaaataaaagacaatgaacctaacttgtaattagggagacggcattcatttccatcagattagcaataattaatactcctgaaaagtgttggtggtgaagaataaattgcttttatttaattaattaatttttcatacagttctgttgcccaggctggagtacagcatgatcatggctcactacttctttgatctaggctcaagcagtcctcccaccttagtctcctgagtagctgagagtacaggtgtgtgccaacacacccgactggttgttttaaaattcattttttgtatatatggggtgtcactatgttgcttaggctgggtctcgaactcctgggctcaaatgatcctcttgccttggcctaccaaaatcctgggattacagacgtgagccaccatgcccaggccagctcttattttagagaacattttggcaatatctagtaaagttgaagctgtgtacaacctgatacctagtaagtccacctctagacgtaggtggtctttgactagcgtatcacatctggaggtacatggcatttgccgcttattggtgatactagttttgtttacttagggtggacccagtaagtccacatttagacttaggggtttctctagactaggaactctcagactatatacaatattctgtgcctcataaaattggactcctatagatttagcgttaattgctgatgataaatacattaaaaatgttaaatacagcattcattacaatgtgaaatacaccattgttgctaatagaaatctgaaaacagcacatatatatatagctatatcagtagggaaaaggtttaataaattgtgatatgttcttactgttgaatcctacagcagtgaaagtgatttctgagattcctgatgtgtactcctatttagcagaacagatgaaccagttcatattccaaccagcaatatatgaaaatgccagtcttactacacctcatagttcctcagtcttctaattattgacaaaaaggtgcctcattatcttaatttacatatttagatatttaatgctttttccatgtgttcaaactgtagggaataataaaattatctgatttgaatttgataagccagatagtaaatattttaggctttctggacatgtaatttctgttgcagctactctgatgttgtagtatgaaagcaacaacagacagtacatgaatgaatatcactttgttccaataaaactatggagaatgaaattcaaatttcacatgtcagcaaatacagtcagccccctgtatctgggggctcagtatctggggttccacaaccacagattcaaccaaccacagatttcaaatattccaaagaaaatccaataaaaataatacaataatgaaagataaagaaaaaaagagtataacaactatttacattgtattagatattataaataatctagatatgatgtaaagtatgcaggaaaatgtgcatatatgcagacactacccattttatatgagaaacttcagcatcaaccagattttggtatcctcagggggaagtcctggaaccaaaccccagctgatactaaggaatgactggattattgttttgatttcaggttttttttctttgagatggagtcttactctgtcgcccaggctggagcgcagtggcatgatctcggctcactgcaacctccgcctcccaggttcaaatgattctcccgcctcagtgtcctgagtagctgggattacaggcacgtgccaccacacccagctaatttttgtatttttagtagagatggggtttcccatgttggccaggctggtctcaaacttctgacctcaagtgatccgcctgccttggcctcccaaagtgctgggattacaggtgtgagccaccacgcccaccagtttcagttttttaccacttgtatttgaatctagaaaagctactttttaatattcccattctaacttaaatgatcacttcatttgcaagaagaggtcttaatgaaatgtcagatttttctggcttttactttttcttcatagcagagttgatgagactaaacataatatcaaggaatcaataaatttaaatagtaatctttaatcacccaaagatttttaaagtaatccttattacttgttagctgttcctttaaacttaatacatgaataatacaaaattcccttgtgaagctgtta[131 bp omitted]aaaccccgtctctactaaagatacaaaaaattaactgagtgcagtggtacgtgcctgtaatcctagctactcaggaggctggggcaggagaatcgcttgaacccatgaggtggaggttgcagtgagccgagatcgcaccactgcactccagcttgggcaacggagcaagactctgtctcagaaaaaaacgacaatgattagtcacattctttgtccagataaaatccacatatttttcccacctattaatattattacttggttctcagctaaaatacaggaaatgagatgagtgaacccaaaatacagcctagcacccagtttggtgctttgtatatgggaggtatttataaatgattgtgccaactccagatgcgattactaacaacataaagtagcctaggcttcaaattaaatgggtcatgtaatcaataaatgctttaatagctggagaagtaaggtaaattgaatttttttttttttttgagacagagcctcactctgttgcccaagctggagtgcaatgacgccatcttggctcactgcaacttccgcctccccggttcaagcaattctcctggcttagcctcctgagtagctgggactacaggcgcccgccatcacacccagctaatttttgtatttttagcagaggcggggtttcaccgtgttggccaggatggtcttgaactcctgacctcaagtgatccacccacctcggcttcccaaagtgctgggattataggcgtgaggcaccgtgccttgccgataaatggattttaagctgagtctttgagggaagagtaggacctgcactgaaacaaaaagacaatttgtggggttggggagaggaaccagatgtaaacaatggaaaggttttggtgtcactttgagaaggattttttggaagggttttgcaatgtccattctgtatcttgggttaacactagtaagtcaaatggagaataatttgagtgtcactcattcctacagatagaaaaattttaaagtagcttgggccgggattttccttttatcatgtgccattgtgtacgtgtctgctacttcatttagttccttttttaaaaatggaatttttatcacttctgtgcaaaggttaaatttttttaataaattaataatggaatgtttaagccttcctcagtaatgagtataatcttatctctccatctgatctgatgggtcaactatatagtaactaaaatagactgtaacagctgtcttcatcattagtttttattttcaccatgcatgtagaatgctttatattgtagtcccttattatctgaggtttcattttctgatgtttcagttacctgtgttcaactatgtccaaaaataggtaactacaatgatattttgagagaccacattcacatataacttttattatagtacattgttataattgtcctattttcattgttaatatcgtactgtgcctaatttataagttaaactttatcataggtatatatgtatagaaaaaacatagtgtatactgtatggggttcagtattagctgtggtttcaggcatcctctgtagaggtcttggaatatatcccttgtggataatggaggactacatatttgactggttggtggagttaacctaaggagaccttttcatgactctttaaacttttaggtttaaaggttgactcggaaaagaaaaacaatttatatcaataaatctaaggtaggcttatatgaatgctgcatacttttcatcactgcagtgttgtggaatgaaaagtaattgtatggattttatactatacaacattaaactcatagttatttggaatatgagcaaccaggaaaagaaaataaccaggtattttgtttgatttacatagtaatctacttttagtagtcatgacaggatgaggtatggcattttaaaaaaagtaattcctagtattgcctaggtttggtactactcagattaggttacatttgcaggagtactatacaacaactgttcactttgatgaatctgaggcctttaaggttcagaactgctttccctatatcaatttttttttttcaaaaaaggctttacaaaataatttaacattgagtatttaattttacattgcaggtactggaaaatatttgttgaagaaattaattattccttaaaactttattattgagttaaccaaaactttaccaaatctcagtccttagctattctgttgcgaagaagtgagagtttactaccattaacaaggctgcagatgtacactgctactggcagaactatccctagagtggcaaaactctacatttcccaagggaacatatctgtgggtcatgttttgctttggagacagtagtaactctaggaggtgaacacagaacgttctacatatttagaaatagaaaaaagaaatagcccttaacaattaatcccacactctcaccctcattacctcttcattctatagatgctctcaagcttcttgtgacttttgttgcaagatgttgtgacatggcatctgactccctattgatcagcagggttaaaatcctcctgggttttcctatccacaatgttctgtgaattgctatatttaaactagcttttttttttgagacggaatcttgctctgttcccaggctggagtgcagtggcacactgtagagtggcaaatgaagacatatttatctgatcctctgatatgaaatcccctattaataaacacctttcttaaaagtgctatataaaagtatgcttataataggaatgtttcctttaatttgtctagaattgaaagggaaataggcaggggggttcaaaaaacaaaagggaaattgaaggcatccagaaacttattttatttttgagaccgagtctcgctctgtcacccaggctggagtgcaatggtgtgatctcggctcactgcaacctccacctcccaagttcaagcgattctcctgcctcagcctcccaagtagctgggatgacaggcacctgccacggtgcctggctaatttttgtatatttagtagaggtgggat[136 bp omitted]gtaatgtcatgaaccacttcattcctctgccagggtcttatttaacccttcaaaaacatgggtgggccctatataatgtgacttcattctacattggatccccacaaagctagtcttggcttttcacttggaacatgcccaatgctgatacaaagtaaagattcactatagatcttattgctatccatcgtacgttataaaacttgtctaaatatttaaaggtttaaaacaagcctgcgcagtggatgtcaagagtaaagtacgtttcatagtaaaattaaaatgccattaaaattttgttcttgtggggctgggtgtggtggctcatgcctgtaatcccagcacttgaggaggctgaggcaggcagatcacctgaggtcaggagttcaagaccagcctacccaacatggtgaaacccctgtctctactaaaaatacaaaaataagccaggcatggtggctggtgcctgtaatcccagctcctcgggaggctgaggcaggagaattgcctgaacccaggaggcggaggttgtggtgggccgagatcacaccattgcagtctggcctgggcgacaagagcaagactccgtctcaaaaaaaaaaaattgttcttgctttgtaaatgctgctttcttttcttcattttggagcggggagccttgccgatagtcagtgacttgtacatttgtttactggcatttgataggctgctccttatcttgcatgaaaaaataaagacctagccagtctaatcctgctgggattcatatcagtggccccagggggttgagatgcttcaaagctactgtttaaatggcaaaaccaagtatcttacttggataatactaaagtatgtcctttatggctttattggaatctgaattgtaaacatttggtacagtggattaaagttctgctttaaaattaatttctgagtatgtgagatatgccttttctttgtgacttttgcagtgcagtgaattcaggctgtttttaaaaggtcaagtttttaaaaggcaggggcattagtgctagggctgcttgaagatgaacagctaatggagaaatcctacagtgaaaggggttgtttttttttttgttttttgtttgtgttttgaggtgtcattctattgagtgtttatatatatatatatatatatatatatatatatgtatatatctccatcctaattgttggcataacattaaaattagtgacacaacacaggtttcttgtataggttttcagaaactagcagtcctcaaaataacagaccaagcaatgtagtttttgctaatggcacttgctgtgactcatgatagtctactgttgatgagcattccaactaaaatagctttcacttcaccattgattaacatggctaccttgctaaaacattttctgaaaccaaaagctagagtgatcattcatagcattgtcttattaaaagactatgtcatactgtatcgtagaaaaagccattctgggtagtaggatttgcttcctggtctattaggttatctgttctcccttctaacttgaggtaatgtctgaaaacagtgccattcaggtattgcttaggtaactaaaccagtgaaaccagtgaaactgcctttatactgttaccaagaacagcagactcccattaaaaaaaaaaaaaaactcttattaccctactcaaattattcatctttaaaaaggcatagggtttttttttaatgtttatcatcttgactttttttttctcttgaaaatttttggattaatttgaagatcatttcaaaatgacccaggatatcacgatctatttttcctcttcctaaattatttctcaaaacagtgtaatttctatgtgtgatgacgtagcagtcactaacaacctcagcgcactttttggttagatattccactccaaatagctaaaatcaactgcttttgggattctaaatgtacttaaagttacagggtctgtatgaaaatgccagacactaattaaattttggtggcccattcatgatacggctcttttatctccggattctgagattgaaaaggtgacttgatcaagctattgaattactgtaataaaacaattactcccttagaattttaatttagaatttgtctacttccaaaaagggtttaaagcagttattactagactggcattaggttatttcaaatgttgcggaacagaggatcttcgtgtatttagcttaacaatacaaaaagaaattttgcaagcataaatattcactcttacaacatggtggcaaggcttttctttgcagaacaatctttgccctcttacctgccagactcttctctcatgctcagtatgtgagacagttaagtaaagggaaaaacactaaaagcaactaaaatgattggcaaacttctcactgtaacctaaactgcttagcatacaaaactatcgtctacccaatagggttttatgtcctttaactgaaaaggacactaaaaataattattgtggacttgagcttttctctttcggcggggcggggggtggggggggagaatcacctctcttacaaagataaaaggcacagaactaacgtctttcatcctttattgtattggtgcgattatgaaatattattatggcttatactttagcaagaaagtaccagaaaggttattattaatcgacaatgaatgccgttgataccttcatgctctttgaagacaggatgctccggctttgaagcgctacatttctacattgctaacctacaggaacctatgttgaggtggtcccaccgaaatacacggctaatagttcatctctttcctccaggaaccttcaggtttttttttgtttgttttttttttgagacggagtctcgctctgtcgcccaggttggagtgcagtggcgcgatggaaccttcgggttttactaagcatccttaccctaattatctaaatctttgagacgtaaattatttgatgtggctaaaaatcctcctgctagaatttaggtccaatcctttaatgttcggatactcaaattctttaacgaaactgatcactgagctaggccgacacaagtccgccaaaatgtccgcagaaacgttaagaaaagctgtcataaggccagcttgaaagacatcataaaaggccttcgctgtcctttgagttaattatctaacacccgaagagagtgccagttctagttagaatccgcgcgtcaggttctccaacagtcagaagggcttgtgtgagggcagggaagattttaaaccccgtttcaggccccctccctaggctgtaggaaaccacccactctgaagcccggcgggggaggagtgctgcagccagctgccgagggagcgctctgcggcgaggccgtttccctgagtcacggagagggcgggaggctgcgcccgtctgcccccgccacgtcctcctgtgaggggctcagtcgaaacaggcagcggtcgcagggaaacgaagcggcacccgtcatgcctcaaggtggcccaaaagcctcttcactcccaggagacgccgcatttccttaaaacgagctctccatttctggcagcaatcagccgacccttccccatcagtatcacgtgcacctggaagtacgtgggtgggacctaaagcgcccacggaagtgacgtcggtcgccccgagtcgcatgatgtggcaaaatgaaaaaaaaaaagtggggggagaaagagaagactggcgaaagtgatgagtctaaaaaagtagtccctccggttcctctgtttccccccatgtggcgtcaggaagcgaggcaccgggcgcactgcgccccgaattcctgcgcccgccgcgcgcggcgctccgtggaggggtacataaggcggagggggtgaggcgactgggcggagttctgtcgccgggatccttccgctgggctcagccgtttccggagtctgcgctgcgcccggttccgccattgcggctctcctggcccctggagcctccgcccccgacccgagctctttcgtctgcctgccagtttcctgcgtccccggagaggatcctgctgagcccagcctcccccctccccttctcctcctctcccttggagagcccgggcagccactgccccgcagccccagtgacaggaggagaccataacccccgacagcgccatggcccagattctgccaattcgttttcaggagcatctccaggtgcggccgggcccgggctggtgagggctgtggagaaggtggtaggaaggatggaagacgctggagtctgggcccgagcagtatcggagctggaggggcgggggggttgtcggtgattggggtaggtggaggagggggcactatcttggaaagcttaaaatattaaatgatgtggggcttggatggaaaggacaggagttggggtgcaaagagctgcaaggaccaggcctggatccaaaggcctctcgatcttgcttcctggatggccagaactgcgcgtacaaactctctccccattttattcatttcattcatttgggtaggggagtgggagggggattctcccttgtttctaccagagcaaggattcttatcccctgggccagtgcggggctgtcaccttccattgctctcctctttccctcatcgtgtctgcacccaggagttgtggggcgggtgggttggggaggagcaaccttttttttccctccctctgcggctctcaactgagaaaggcaccttctccggtggtgggggttgggggtggtggtgaggcggtggcttttctcttgccttccctgaggcagtagggacagaaggtcactgaaagaacggaacgagggtagaatgggagaacgcatttcttagagctatgtcaatctcagagtgtgtgcggtcaaactccctaaggaaactcgcctccccttccccctttttttatttctctggggatgttgtggctcttaacccctctttggttctggaaggtaggaaagagtgatacagaggttatcttttagtcttctcgagtagtagcaggtagttttgaatatcttcttcaggatcgcatggaattgaacagagccctggggacagcacagctgctctgagacctgcagggctatttggtctgtgactggcttccctttagtaagttctagagttcttccccatggttccttatcctggaggcaacatattgttatctggcaacatgccagtggcgggcctaggcaggtgaccattggaaggcttcactgaattaaacctcttcagagcttttgattttcctgtgtcaccaatcctgttttttactgtagcttaaataatttattcctattaatttgctttcttcccaaatatccccttaaagaaacctgcctcagctcagtcgtctgaagggctaattccataatgacagggaatgcagtggtttgacatgacactgatatcagtgacctattagacactttaccattgaagaccatttttatttacatttccccattggcatagcatacataaaggattcttgttaataaaaggttttaacattcaggctataagtaacataatttcatatttctttgcaagtattaccatgtttgcactagcaaggacttattttcctttaaggcttgaaatgtaaagaataataaatttttacccataaaatgagttaaataatgcactttcctcagtcatctataattttcaaataactcatctgaagtaatggaatataccttggcaataaaaacacttttacagagggttaaaaatgttaaataacaaaatggacatttttttttgatcaatccaagtttagttgctgtggttgcttttgttaaagtggggtggcaaatgaatgtggagagttgaggggtgctgttcttaagtgtgaggggaaaacgcgggcttattttcatattaaactgcatctgaaatatctttctgcagacaaatgtttataaaccacacagagaatcaagtacagctgctctttattttccacggcagatgtgtagctcactactaaatcttgtggtggttggagtaatagcttttcatttcttttaaagaggagacaagaattgttaaatgatcccaaagattcgaacccaaccttgtcacttattaaagacaaatttaatacatgtctgttttgtaactggatcaaagtttctgcagatgcttgaatgaagccattttcttctcaaataatttgaagattttgaatataaagcgatttgcaaattgaaaaattcagtcctctgtgttttggattgctatgtcatgcctaaacttaagcttgcttagctaatatgactgtgctccagttgattaattgtggagcccaaataactacagcctctttcatgataatatatctcctaacttcatatcattatctcctccctttttaaaaattaataagcattttgtttttttgaggagacagggtttttgctggaggtcagtggcaccatcacagctcactgcagccttgacctactgggctcaagccatcctcccacctcagcatcctgagtagctgggactacagccatgagccaccacacctggctaatttttgtattttttgtagagatggagtttcatgttgcccaggctagtctcgaatgcctgggctcaagcaatcctttgccttgacctcccaaagtgctgggataataggtgtgaaccaccgagcccaactaataaggattattttaattggcatctttggtctttgacctctgagcttctaccagtttgctaagtagcagaaaactttctgaaacacgtaggataaaaactggaaacaagaaatggggaacttaagtgtgagtgtagagttaccttgtgaaactgtaaatgaacttatttttataccctttaactacattgtccaactgaaggatctcttgtcatcaaagcttggacctacagcaaatgaatgtgaatatatgaagatttctcttttcctagactgtttagactgatagcagttaataaatgagtgcctatttgagcaagatactgttggaattgaagattctataaaaatcctaggctacatatataaaatattgcctgtgattcttaattttttggtgattttcaattttctggcacattaagtatctttaggccacttgacacattccattgtattcctagattctttgggtcttcaattaaaaatctccctaccctgttctttcccctttgatccatagatgcaggcatggaatgtgttgttgagtcaaatgttaggggttcttgctatagttagttcggattgtgaatagaaagcaatgctaagtactgggatttactacatgcttagttgtactctctggaagaggtagacttcctggaattatgcggcagtctcctgggaatagcttctaagtttaaaatgtatcatattcttcagaattttcttgatggtcagtttacccagcttaaagtgtgtggttaattttagtgaaagtgctttcactctgattaggaaataagacacagaatggtgtgtatgtagaacacaatcattttcatttgagtatttaggaaaattcacatttcaggaaccatggtagttgctcttgaacaattgtttctgaccataattggaatttgtaccttgcttttaaaagattccatttatatcgaatcctcagcttctttgcaaaattgttttttccatacatatgtttatatgttattcaaattatatttaacaaggtgttttccctgtcattgttaccgttgtggctttttctctttgagttattgtccagtagaactttcttcaatgatggaactgtctaccagctacatagggatattgagcacttgaaatgtggctgatgtgactgaaaaactaaatttttgctttaatttctttttaatttaaatgtaaatagccacatgtgacaattgactcctacattggactgcacaattataggccatgctgatgtgttttgtaagtttgaagatttatctcaccactcatgtttatgtatttagaatatttcgttagctaaaattaaaacactcattgttcaaaagttttaactgaatactgtctgtcttggaaagtggtggtgatgaacaatgactagcagcagacttcttgagaccttattatgtgctgtaaatttggctaggtactttcagatcttcactcaatccccccagacacctttctaaaaagtgagactcataaagtagtgggaatgctgtccgaatgggatgtgtacctgagtcttctgacacaaaatatttcaaagaaattggataattgaccttaaaaaaagaagttatacagtatcctagagtgctttttgtctgttggacttaggcccagagaggtgagttctctctacttgtttatagattaacaatgtggtatagtagacagaacagggagggctttagg[138 bp omitted]acagcaacctccacctgccaggttcaagtgattctcctgcctcagcctcccaagtagctgggattttaggtgtctgccaccatgcctggctaatttttccatttttagtagagatggggttttaccatgttggccaggctggtcttcaactcctgacttcaaatgatctgcccacctcgacctcccaaagtgctgggattataggcatgagctgctgctcctggcctcatataaataattttttaagttttctagcagccatattaaaagtgaaaaaacataaaattaattaattttgggtttttttggtagagacagagtcttgctat[133 bp omitted]tgggatatgcaaaatattatttcaatatgtaatcagtataaaatttactaatgagataccttacattctttttcatactaaattttctaaatctagtgtgtgtggtttttttttctttttttttgagacaaagtctcactctgtcgccaggctggagtgcaatggtggatctcggctcattgcaacctccgccttccaggttcaagtgattcttctgcctctgcctcccgagtcgctgggactacaggcgcgtgctaccacgcccagctattttttttttatttttattttttggtatttttagtaaagatggggtttcaccatgttggtcaggatggtctcaatctcttgacctcgtgaaatgcctgcctcggcctcccgaagtgttaggattacaggtgtgagccaccgtgcccggctatgtatattttgtacttagagcatatatcaattcagaccctattttctttggaaatcctggtccgtatttagagttcataaaatttacagttagaaaggcagatttggggctgggggtagtggctcatgcctgtaaactcagcactttgtgagccaaggtaggagcattgtttgagcccaggaattcaagaccagcctgggtaacagagttaagacctcgtctctatattaaacaaacaaaaatgaagaaaaaggaaagcagatatgcaatacttcagtgatcccaaacatacttaagttttccagtaattgaatcacttactggttattatttaattttaattactttaaaattacggtaaccacatttcaagtgctcattatggtatgtaggttgtgacttgtggttaccatattggacaacacaggttaagtctaacctcttgcttttttttctctgggaaatgggcatacttatctcacaaagttattatgaggatctgagatcatgtatgtgaaagtactttacgtagcattttaggagcattaattattggctaaataatttttgtccagtacattttattcaggtatctcaaccaatgacacaatattcatttacagatccagtgttttatggtgtataagtatttggggttaacacatttacctaagatttgagtacttactgcagatgaggaactgtgttagactctagggacaaggtggtaaacaagatggactacaccttgcattcatgcttccattgatgagttggcaaaggctgtacacttgttattccaaccattgatgttgtctacttgattgtggatcttttatgtgttcgaacatttgatattgtgcacagtttaatacaaatattgatatgatacaaagttgattacactctgaaactgccccccaaaaagaaacttttaaataaatcttttattatgttccacgagtctcattgtgtgccactggtacattttaaattagggttccttgaacagacatatttgaaaaaaaaacttaatgaatcatatcggataaaatacccatatggaatgccggtcaggcgattgttagagttattgtatgtgttgtatgtgtccttttttagggtggtagtgttgaagtgaatcttctcacttagatgagcagtaggttcatggctgatattttagtcctgtatattagaatgaggctgtttctctaagttcatgcactatatgccatgccaaaactacttcatgaaataaacctgtcttctgagccacagcaaagtttacagctctgggtgtcttgtctttgcttcttggttaagtgcctatggctaatgctcttaactcaaaagatggctgaaagcttggacctaaatgtgttatgcaaaacccatctgtcagacttttgtgagtctcttcttttgtattatctccttaaattaagacataatttaagatatttttgtcctactttttttggggggtggggacagggtctcactctgttgcccaggctggagtgcagtggcatgatcaaggctcactgcagccttgacctccctgggcttaggtaatcctcccacctctgctccctaaatagctgggactacaggcgtgcgccaccaaacccggctaatttttgtattttttttgtagagtcggggttttgccatgtttcccaggatggtctcaaaatcccgggctcaagcagtccacctgccacagcctcccaaagtgctgaaattacaagtgtgagacaccaagccttgtcctatttttgaggcagtaactattcaaatcttaattgtcctgtaatctaatccataaaatcaaaatacatgggccattatagttgtttgagcacctattacgtgccaagaactgtattaaatatttaatgtttattatctcatttaattagcaagagaacccttgtgcttaggtcagattagccttattgtagagattgggcaactgaagttcatagtaggtaacttttagagtcacacagctagtgagcagtcagacttttaatatttattctttcatttggctcattgcctcatttggtaaatggtctgtatcatttgaattgcaaaatgtaccacaattgtttatatctatgctgtgatgttctttgattctagtagtactgtcgtttgtttatcgtgaaatattttttatattatgagaaaagtaggagacagcaaactaacatctgactttatgccttgaatgattatttagctgtatcttttttaaggactttatcctgtttcctattggaaaattgtgcaggatgattgggatccggttaacttgtaaccaggattgtctgcatccctctcataagactgaacttgtcacacttttctatagactttttcttactgaaaagaatgagtgtgttccagtctgaagccacttgtgaaaggaggaaacttctgctttctattttactgtaaattcatgtttttgtgtttatgccaagaaatagaagcttgaactcaacgaaggcagttgtgcatgaaagggataggaaatgaaggtgacaatggaatatatttgctcattttgagtagcatcatggtagaaaggaaaatggttacagacttgtagggttgtgctttggaggcagactgccagtactgttaatacttcttgttcctaatccttaggtaaataaggattttcttcaagttctgaagtaagacggttttaaagattattgctgaaagaataggaaccagatccattaaagccatattttgtcacattaaaaaactctgcagtgtgctattctggaaaatgtctcagatgtttaatctgggcttatctattgattatgtcaggttttcaacttgtctcaacttcctcatttattaaaacaatatttcctggcaattttaaagttagactacagtatgtttttgtatttgtagtataatatttagccccttaaccccttacaggcactcgaatattagttcttcccctccaccctggaagagtttccctttgtccacttgagttgaatatatgtgccgtactaaaggagaaaaactaccatctacccagttattgaagccaagatcttgaagttacaccagactctctaatttctcattttctgcatccgtcgatttctggagttcctcagtgatgcacactgggggtctcagggatgacagtttttcatgaccctaggttgaaactgggagtcatagaagacgaaaaaacgagaattggattgggagttgactctgttgcccaggctggagtacggtggtgcaatcttggttcactgcaacttccgcctcccaggttcaagcaattctcctgcctcagcctcctgagtagctgggactacaggggcccgccaccaggcctggcgaattttttttgtatttttagtagagatggggtttcaccatgttg[132 bp omitted]aggtggcttaaaaaaaaccaccaaagtggacagactgaagctaaagactgtcagtatatatgctctgcttggcaaacagctgactttggatagatctcattatttaaagatgaataataagggggaaaaacgtgtagagagaacatggtttacaaaaacccatctctttctccagtctctgcaatattctatatttggtcatattgaactatgaaaatctaaggcaggtttctttattttaccacagatatcctcaggaaagagtctccttattaaaagccttactgaatctccatagtattgtgtcctctcacagttgcttctgttctgagcaccagaatgctgtttggcaaaggctgctgtaggcttgaaatcaactggattagtgagagacaaattttacacatctaaaattctcctgtgtatggcctcacagttggaactgttggatgttataagcagatgatttaaatatcccgtgaaaagcagtccattcgggcatgtttctagagatcataattttttttttttttttttttgagatggagtcttgctctgtcgcccaggctggagtacagtggcatgatcttggctcactgcaacttctgcctcccgggttcaagcggttcttctgcctaagcctcccaagtagctgggattacaggtgcccgccaccatgcctggctgatttttgtaattttagtacagatgggatttcaccatgttgtccaggttggtgttgaactcctgaccttgtgatccgcctgctttggcctcccaaagtgctgggattacaggcatgagccaccacacccagcctagagatcataatttacatagaaagataagagaaaaacaactctcctgataacgcaaatagatttgatgttacaaaactgcaccattatgattgctctgtaatggatttttgaaaagcattgtgaaatggagatgactttccagtgctgatgtcaaaaatgcatatgcagagtttaaatataattttgtgtgttttgttttttgagacagggtcttgctctgtctcaagtggagtacagtggcgagatcatggcttaccacagcctcaacttcccaggctccagccatcctctcacctcagcctcccaagtagctaggactacaggcgtgtgccaccacacccagccaatttttgtatttttttgtagaaatgggctttg[133 bp omitted]aagcaaaatgactagttgaattgtacattaaatatatctaatccctaagagtttataatgaaaagggatcaaaactttttcaattgcgataaaactcacataacaaaattaaccattttaaagtgaacaatttagtggtatttagtgcattcacagtgtcgtgcagccaacacctgtatctagttccaagacattttcatctccccaaaaggagaccccatacacgtgaagcagtccctctcccatccccctcctcccatccgctagcaactgctaatttgctttttgtctctatggatttacctgttctggatatttcacataaatggaattatacaataaaggaccgtttgtttctaacttctttcactaagcatccatgttatagcatatatcagacttcattcctttatgactgaataatactttgctgaatggatatatcagtgttttatttgtcctttcatcagttggtggacatttgggttctttctaccttttggctattgtgactagtggtgttgcaaacattcatgtacaagtttttgtttgaatgcctgttgtcagttcttctagatatatacttagaagtggaattgctgggtcatatggtaatttctctgtttcaactttttgagagaccacgaaaccgttttccacagtggtggcaccatttgacatgcccactagaaatatatgagagttccattttcttcacatcttctgacagctttttggggtgttgggatgattcgtctaattgggaaaataagtaccttatttgggcctatatggtatttttaattctgtgtgtctgctcccaaactctgtagccctgccctcccttatattgtgtatcctgtttcagattgtttccgtttcttctgagacactgcatatacccctacatgtatctgtgctaggcatacatccctgtaacttcatggcatttttgtaattgctgtgtacctgttacgtatactgagtgggagtgtctcatttgctgtagaactctctgcattagtgtagtgtctggcacacagtagctgctcaggcattttttaagtatatgattattgggaaaactacagagctagggagagatctgaagaaatactagaaatttttttctgcaaagaaaactttagaaaattgttgacatcatctgtggcatgcagcaaaagttgatgtaaaaggaacagaaagacctatggagataatgggatgtaataacagaaaacatacataaacaattggttctgaaatcagttaagagcagaactggaattcatactctgtggaatgaatcagcaatgtggaaggagtaacaagattttttaaaaagattttgaatttaggctgggtgcagtggctcacgcctgtaaccccatcactttgggaggccagagtaggtggattgcttcaacccaggcattcgagactagcctggacagcatggcaaaaccctatctctacaaaaaataaaaaattagccaggtgtggtggcatgcgcctgtagtcccatctacttgggaggctgaggtggatggatcacctgagcctgggaagtggaggttgcagtaggctgaagtcatgccactgcactcaaacctggcggacagagtgagaccctatctcaaaaaaaaaaaaaaaagattttagtttagaagtaaatcccagaattaagtaaaagtggtgtgtgtgtgtttgtgtgt[222 bp omitted]gaggcagcagaatggcgtgaacccaggaggcggagcttgcagtgagccaagatagctccactgcactccagcctgggcgaaagagcaagaatccatctcaaaaaaaaaaaaaaaagatttttagaaaccaaaataattggaatggaagctcttttcaatgaaagaaaacttttgtaatttgaaagaaccaaaattaaaagggcttagtgtttggaacaggcctgaagaagttgtaataccatgaatttaaaaaaacaaaacaaactcgggaggccaaggcacaagaattgcttgaacccaggagccggaggttgcagtgagccgagattgcgccactgcatgccagcctatgcgacagagcgagactctgtctcaaaaacaaacaaaaaaatccctaaaactataagcatctagggcacatcctcttcctgaccaaaaaaatcaaagtaatactagttttttaaccctgaattttagatagtgaagcagtgtctatagtttttgagatggaaagtgtcttcacttgtttttagaagacatgaatcacaatttgaacccccaaagagcctctgagagcctaaaacctgttttttctcctataggttgtttcctcactagtaatgacaaagttataatcttagcacaaaataagcaaaggggacagtttcacacaaaaattgtacttaaaatattgagtttgtgttaagttgctaaataatggatgctcaatatgtattaattgaaagcaaatcatggtggttgtcattttaatcattttaatgtcattttaatcattttaatgtcattttgaactccctgaatttgttaatattaaatcattttgagataatctgtaactcctcatgctgattgttagttaattcattcactcatttgaaaacagtatttgtggcatttaagctcacaggaaaacactccaggctgggtgcagtggctcactcctgtaatcccaatactttgggaggccaaggtgggtggatcacttgagatcaggagtttgagaccagcctggccaacatggtgaaaccccgtctctactgaaaaaatacaaaaattagctgggcgtggtggtgcatgcctgtagtcccagctactcaggaggttgaggcaggaga[132 bp omitted]aatggttctagtcttataacttgtagcacctggtagactgagtatgccttaaatgattgatctaactagaataatgtgggatagagcataatgtctaatttcctggcaggtccctcagtatagggtagaaagataacatgaatatgtacaatagtgatggggttgacagaatgtaacactaggctcccacttaaatgtacattttgtgaagtcgctgggaagttgtgtcatagaatgaagtttatcaaggatctttataacttgaatattaaggagactgtccagatgttttattcatatcaggaaaccaagcctttaatgtctccctggttacattcatttataacatcctttatgctaagtcagcaataagtattatatatattttttgagatggggtcttgctctgtcacccaggctgaagtgcaggggtgcagtcacagcttgttgcagcctctgcctcctggactcaaacaatcttcccacctcagcctgccaactagctagaactacaggtgcacaccaccacgcctggacagtttttttattttttgtagggacagggtctcgccatgttgcccaggctggtcttgaacacctgggctcgagaggtcctcccaccttggcctgcaaaagtgctgggattacaggcatgagccactatgcctggccttgaaccctcaaagtaagcccatttggtaggtttggatatattctgcacaacttctcacccctgccattgaatgtagctgtggttgttttgtgctgctgaattgcatttatacggggggcataatcttggtaagtcatatccatctccaagatttggggcataaaaactcctgtatttccctgcagcttggttaacattggcctaattgatctgatatcatctaattattggcttattttttaagaatgcattaaatataaagtttttgaaaatttccaatcagcagttgattacaagtaggaaaaattctttgagtctcctggtagtttaccaaagctaataatagtctgacaacctctctccaactgtggttgcttcctgaatatattgcttaaatttggagtttgtgaccagaatcaaaaattctaagagccagtgattctctcaaaggctaacatggagtagaaaaaaactatatgtttaaatgtggggacagcaagggttaaaggcatttttatttgttgcttgaaatctgtggagcctacagaaaacagtggttggtatcctgttgatggaagaactaaaggaatgctgcattctcagcatttcttatttcctgtagaatacagcaactgcagtttttatttgacattctgctagtttccaggaagggctcaatgaagtgactgctgtcagcatcttttttcaccgcgactgatactagagaaggtagaggatgtttaggagcttttaaaggaaattatgtttagtgaaatacttgggttaggaagttaaccaaatctttaagtactgacttaaaaatgcttgtattgagagatgaatggtatcagaatgacatacaagtatcagcaggtctctcagattgttgacctattaactctacagtggtaacacttctaaagtccttggtaagatacaagattcatttgcagaaaatagctccatctgaaaaacagtagctcatacatacttcctttacattttccctattcagatgaaacaaggaggatctggaaaatgtgaagccaagcaataattgtgaaacataagtccttagtaatgctgtcataaaccagttttcatgtagtttgattttcagctgataaagctggtaaatgagttatactacaaatctatgattcattaggaagcaaactccttaggtatacttacagagaagccaatttccaatgagtttattcttaactaatcagatgtgagaactgctggttgaaattagtaggctcaaagcaaacctattactcctttaattatgtggcgtctgtaggcacaaacagatagattatgaatgattgctgagagtgtgccttggtgctaatggagagttgtctttagatagtttaagaattgggccttgaaaaaattatggttttatttggttgtatgtcttaagctagcattttctgcccttcttaaggtatatagtattgaattaaatatattaataggaccatggcctctttggtcctcttaacaatattttcatagtttgatcactaatatattctgttaagatgctcatacaacaccattaagtttcctgattccttgatgtatcagggtttccccattctgtctttaggagcatgtgaacaaagcgaattggcccaggtaaggtttgagtatataacagtagcatgatgcta[133 bp omitted]ggctgaggcaggagaatggcttgaacccgggaggtggaggttgctgtgagccgagatcgtgccattgcactccagcctgggcaacaagagcgaaactacgtctcaaaaaaaaaaaaaacagtctatatcataataccatagtcccagaactagaagttcatcaaataatggagtgctctgtgctcccacactaagtgcttgatgtgtgttaaatcaccttaacctttcatggagcacctaggcatgctgctttgctccctctcaagtaaggatggatactttttttccctttccattttccatatttacaatcaaatggagtatatttttaaaaccaagacaggaaaaacaaagtttaaaccattaaaaactgatgagcattcaacgtagatttctgagtctcattgctgatgtgttttttatttttattttttatttttttggagacagagtcttgctctgtcgcccaggctggagtgcggtggcgcgatctcagctcactgcaacctctgcttcccttgttgcccaggctggtcttgaaccgaactcctggcctcaagctatcctcccatctcaacctccaaagcactgggattacaggtgtgaaccaccatacccagtcttgtatttgcttgtatttgtttcttttgcttaaacattttaaataaagtcaggctatcatattttacctgtaaacacttcagcttgcatctttagaaaataaggacattttctttctttttctttttgagatggagtttcactcttgttgcccaggctggagtgcaatggcacgatcttggctcactgcagcctctgcctcccgggttcaagcgattctcctgcctcagtctcccgagtagctgggattacaggtgcccaccaccatgcccggctaattctttttttttttttttttttttgtatttttagtagagatggggttttgccatgttggccaggctggtcttgaactcttgacctcaggtaatccacccaccttagcctcccaaagtgctggaattacaggaatgagccaccgtacctggccaggacattttcttataatcataatattatttatagctccctgatatttaagaacaatatcagaaaaccagtccatattcatattttcctcattgtccctaaatgttgtttggtttaaatcagaatccaagaaagctcatactgctttcagttatgtctctgaagtttcttttcttttttttgagacggagtcttgctctgtcgcccaggctggagtgcagtggcacaatctcggctcactgcaagctccgcctcctgggttcacgccattctcctgcctc[212 bp omitted]tttttttagccgggtacagtgactcatgcctgtaatcccagcactttgggaggctgaggtgggaggatcccttaagcccaggagttggagaccagactgggaaacaaagtgctgcctatctctacaaaaaaaaaaaaaaaaaattagctgggcatggtggcgtatgggtggtaccatctatttggaaggctaatctattatcagtagttaaaagaaattcacacccagagtttcagccaacctatggacagctgaattaagcagcccaggaggttgaagctgcagtgacccatgattgtgccactgaattccaccctgggccacagagcaagaccctgtatgagaaaaaaaagaattggaagtcctaaagtgtaatttccttttctcctcacttccccaacaaaaacaaactttaaaaaaaaaaaggcatttcatagtgtctgaggcagttaagcacccagagaccactaatctagtatcagtagttgaaagaaattcacacccagagtttcagccaacctatggacagctgaattaagcagataataaaatgcaaatgcaaaaaagctaaccttgagctggcttaaagtactgatatgttgtatgtattaatagttaatatcagtgagctctgggttgcttgatcccaggagtttaaggatacagtgagctgtgatcacatcactgcactccagcttgggtgacagagcaagaccctatctcttgcactccagcttgggtgacagagcaagaccctgtctcttaaaaaaaaacagaaggcaatatctgttgagctgttagatgtcaggcattgttctttgcattcacattaaatcttcacacctctgagatagatactgtcatctcaaatgtttcatatgagaaaacataaacacagcctgtgttctctagatcagtggtccacaacctttttggcggcaccagggaccagttttgtggaagaaaatttttccaccggttgggggtgggagtgggggtgggatggtctcagatgaaattgtttcacctcagatcacaaggcattcgttagattctcataaggagtgagcaacctagatccctcgcttgcacagttcacaatagggttcgcgtgcctatgagaatctaatgccgtggctgaaatgacaggaggtagagctcaggcggtgatgactgctcattggctgctcaccttcttctgtgtggcccagttgctaacggaatactggtctgcggcctgtggttcgggatccctgctctagattatggggaagccgaagtactattttctcattataaaaacagaatcctaccttttactccccacctccccctgttaatagaagttggaatggagaaggaaggagatgcattttaaaatcatttgtaacatgtaactccagggtacttcagagttttaaagaataaatagggaataaatttgtttaattgcctttttagatccaggtttaggtgtcaagtcctaaagtagtgccacttgcagaccaaaatcgaatctggaaaccaaatgagttacaaagtttgggtgcttttctgtaaaaacaaggaagcagtttatttgtatacttttgtgtcttgtgccattctgttggaaaagggcggaggaaatacatactttcatatgctacaggataactctgaaatgcaaaagtatctctaattgcttaggggagaagggtattactggaaagacggggtgggtgacttttcatagtataaccttttgtaagattttagtgctttactgtatgcacgtgataactattcaaaaaaacaagcccctttttttggacccagtttattgactccatattcttataacagcaaaataaaaattcttttaagttaaaaaaaactttatcataggaatttccaagcatatgttaaaataggatatctccagcttcaacactaatggcattttgcagattgagaggataataaaatgtagctgtagtttggatacatgtatccagatatattacatgtatttcagatatgtcctctgaaaatacctgcaagtttatagagaatgttgtatatgtcctttgactttatccatgcttagttccatagtgtataattcagtttatggctgggtacagtggttcatacctgtaatcccaacactgggaggtcgagctgggaggattacttgagcccaggagttcgagaccagcctgggtaacatagggagaacctgtctcttaaaaaaaaaaaaaaattagccaggcatggtggcgcctgtagtctcaggtactgaggaggctgaggtaggaagatcacttgagcctgggaggtcgaggctgcagtggtaccactgcactccagcctgggcaacagggcaagaccctgtctcaataaataaagaataaaaatacaattcagtttctgtggtatagcttatatgccatcacacctttataactgactgagaatactttatggttactatgtgctgttttgaaaataaaacctgtttaaaaatatgttgcattttaaaagttttaatctatattgatattactagacatagttatatagtttggccaccctgttacatgctcctactgtaagggtatacctaaaccagacttgcagttaataagagtgacttgtcctattattgtgtgctttggcatatttctcttttgagtatataacaggaaaatatgggaagaattgctgagtgttctagacattctcactcaaaaggaacatcagtaaggaaaacaatcttacctaccttatttgaagaggtggaagcaaatttaaccttctcttagccaatacggtcacttgaagttcttttttttttttttgccaaagtcttgctctgtcactcaggctggagtgcagtagggcggtcttggctcactgcaacctccgcctcccgggtacaagcgattctcctgcctcagcctctggagtagctgggactacaggcgtgtgccaccatgggcccggctaatattttgtatttttagtagaaacggggtttcactgtgttagccaggatgatctcgatctcctgacctcgtgatccacgcccccttggcctcccaaagtgctgggattacaggcatgagccaccacgcccagccgaagttcctgtctttttttcctcacaattaggaaggctatataggaaggagcagggtcctgttcagttgtgtaaatgaccaccacttaagtgtgcttttttaatatgtttaaacatgtgccattattaagaatttgacacggctggacgccgtggctcatgcctgtattcccagcactttgggaggccaaggcggacggaacatgaggtcaagagatcgagaccattctggccaacgtggtcaaaccccatctgtactaaaaatacaaaaattagctggacgtggtggtgcacgcctgtagtcccagctacttgggaggctgaggcaggagaattgcttgaactggggaggtagaggttgcagtaagccgagatcatgccactgcattccagcctggtgacagagcgagactcggtttcaaaaaaaaaaacaaaaaacttgcaacttcagaattatgttcatgtttgctggtgttttaactcaaactgggacataaatcctagggaagtaacccatatcactgttgttctaataactgcattcgtagtagaataacactacattcactagtagaggctgagggagagaggaaaagaaggaattacaggttacaggctacttttctgttcttgtctagactgaggctgactgacttgtctagactgaggctgaggcaggtggaccatgaggtcaggagatcgagaccatcctggccaacatggtgaaactccatttctactaaaatacaaaaaattagccgggcatgttggcgcactcctgtagtcccagctactcgggaggctgaggcaggagaatcacttgaacctaggaggcagaggttgtagtgagctgagatcgagccactgtactccagcctggctggcgacagagcaagactccatctcaaaaaaaaaaaaaaaaaaaaaaaagagtttgtcacttgcctcctgtttaattttgcattttttaaataaagtatatctattccacatggactattttgattagtaccaatacattcctgaaggagatcaaagatatatatgcatagctctcttggtagcatatgtttaatgagaaagtaatataaggattacatagattagggttgcaggcagttctgtcactttaaagccagatcttttatttaccttattttttaaagtttttgcagagatggggtctcattatgttgcccaggctggtatcaaactcctgggctcaagtgatcctctcatctcagcctcccaaagtgctgggattataggtgtgaaccaaggtgccaggccaaatctttgttgttttttttttttttttttttttttacaagtaaaataccctgaggctgaaggtcattgctaactgatgcagcgtgtttttcttactgctttttttctggggatctaacaaggaattggaaacacaggtttttgactttcctttttcctcctcattgttttctgatagtgttttcttaaagtcatcttccacctgcctctgaagttgagaagtaggaaggaatctgttagaatcacttggggttcagttagtagtgtctgtggtttgcttccttttgtggttttgaatttaatttcactatttgactaacactatttttactccgacttcctcaaacactgtgggacttaagctgtgacaggtgaaactcagtgccttagatgaaggcttggtagagacttagaaacatagaattcttacagggtagcttaggattcttacagcataacttactgcttttaggtatatagctctatgaactttatgagcccactggaatgttttctccaattatcggaaaggataattatcaattaaacttaaggagtctaaggaccctctactcagaaaaatagatgtgagatcctgtctcaaaagaaaagttaaagtcaggaagaagttaaaattaatggtttataaggctttactataactaaatacattataagttacatactttaaagctagtgtatttgccttgcattacagcatatacttgagcttgtaaagcaggttaatctactttattacgatgtttgtattaatggttagagagttgtttgacttcttgcccctatattcagtgactgagttactgtaactacactttataactgagttataacattaataacttaataccagtagtaattgagatagaagagtgaagagaaagtaaaatgtagccttgtagtcttatgttatatcttattcagagcctggcctggttatgtttaagcactattagcagaagagtttcagaagagaatttaaataaaatacagttaacttggctggtttagtccataagataatagtgacagtggtggtgtttgtggaggaaaactgtattgctagaggacaagggtgacagaaagacttgatttttttttttccatgctttttcttttctggggtgtgtgtgtgtgtgtgtgtgtgtgtgtgtgtgtgtattttgtaccatgcgaatttattatattacctttggaggaaagggggataaaactagtctggccaaggctaataaaataaagcctccatgtagcttcttttagtaggacttaatctgttacaacatagttagtcacccagagtattaataacccactatggtagagatttcttcctagtaacaagtgacttttgttcttacatacttaattggtttgcaaagacctaccatctttagatccactatatttgtttagcagatactttagtattttctgagtacacaaagcaaatctaattccattattttccttgttaaaatccttaagtagctcccttcgcctgtagaataaactcaggattcttactgaggtatgtttagcttgttggtctggcccttgctcatttctctaaccttaattgtgtactccctcaatcctatagtgttacaaaagtacttgtagttcccttagccaaccacacttttacgtctctgtgctttaccacatgctctttctgttgagaattctctcgcctgcctcctttgaacacattgctttagctgtgtagcctttgacaagatccctcttacatatctttgttttggcactttttgcacagaattagaacttgtttgctcttgctattcaagttcctttatttagatcaagaattctgtgacattttagatctttttatgcttgtaacttaatttttcagcttcttgaagcgtgaacaaataactgctacatgttaaggggggtgagagaggactggtccaatagttccaaggtcttaaaataaatcaagaaactcaattacctcaaatcccttgaaccatgcatgctaccttgcagatgttgctctttcctttaacttcatctgtatttgttctgcctcttatttgaaacagttgaatggcatgtttgtttgaagaagagaaggtccaatacttggctattaatagtctctctttaattaacataatgtagatgttattgtgaccttgaagcattaatgttaagtgaggatttgtgttgatgagcatatatgaatgtcaagtctttggaatccacttggtaacatggtttcttattattttttctagctccagaacctgggtatcaacccagcaaacattggcttcagtaccctgactatggagtctgacaaattcatctgcattagagaaaaagtaggagagcaggcccaggtggtaatcattgatatgaatgacccaagtaatccaattcgaagaccaatttcagcagacagcgccatcatgaatccagctagcaaagtaattgcactgaaaggtataaaagaatgtgggttttccttaaaactcttcctatgtttttgtttttttttgttttttttttgtttgtttgtttgtttttgagacggagttttactcttgtcacccaggctggagtgcaatggcacgatcttggctcactgcaatctccaccccccaggttcaagcgattctcttgcctcagcctcccgagttgctggaattacaggtgcctgccaccacaaccagctagtttttttgtatttttagtagagatggggtttcactatgttggccaggctggtctcgaactcctaacctcatgatccgcctgcctcggcctcccagagtgctgagattacaggcgtgagccaccacgcccagccagctcttcctatgtatttatgcaagtacaataactagggtttacctttttaagtatattgattaagtttggttaaagaaaatagatctgctaataccgaacttgatttaaaccactttaattacttttacttggaatgtatctgtggaatgtcttaacatatatctacttagaataattttaagttttagaataaatgcatttaaattttgtatctggtataaaactgtgctaaacatatctctctacagaggaaagaaattagtgattcatattctggaatagaacatactttactaatattagcacctaaacattgcagaattttgttatgatgataaacttgcctttgattctgtgcttttttttttatacttcgggcttgtgtttcacttagattattgggttctagaaatggcttgaatttacagtaattgtttaaagtgtgtttgtatttaggtggatattaaagctcttgagtgaagggtatttgagtttattcagactaactttttaattgtcccaacaagggaactgtgcagcttaagtctaaacagagttcaaagactcttagactgtcacggaagctgtattcctttgaactttagaatgagactaattgaccctttaaaacagatgtttttaagagggctcggtgacaaactgactcttaaaaaggcattcgattgcctgctttgtttttcattttgatagaagaaagaagagttcaagttcgcagtaatttgttgataaatttgtgactaagttattagaggtgctgaactttgacttttctttacatgatttaaactttgtatatagtaataatactagttggagagtgaatagggttgggtaggactaggatattcaaacaaataagtcactatcacatatctaagatagaaactcatctcatctcgaggaaaaatggtccagctttcacataggaccagatgttttgtgacagtaagtgttttacttctattacttctatttagggtattaagcttccttcagactctttaaagaatttaaattcaggtccttagcaattcccatgcctctctattaaaaggccatcattttaattttgccaaaattcttttctatttttaatgttattgttatcttatcacatttcttaatgctttcttatgtgtgcagatggtgagttatcttaaattagattgtattagttattgtcctgttctataaaaagaataaattgaaaagattttcggagcattgtacaataacatcatagatttgtccctatatgtctgcactatggagtcaagctgtcatcccttgtccccctccccaagaccaccccacttatgtatatattccaacccctaataatctgggagttgaggaaggcagcaaaggaaagtaagtcattccaaaatactgcttccctctgaagccagttttgaaccccttggcttctttttataaacaggactgtaactctcacaatttttcaagtctggttgtggtttacatactgtgtgggatgggaataacattcttcattttatgaaagaaatttttgcacatgtgttacggagggttgtagtacaaagctgtatgttttgccccccttctttgtccccccagcacccgaatcttaaaattttggtccttcaggagccagattctctgtgtctcaggaatggtgtttttcttagtctttaaagactaatcttgatagcctagtgatagttgtaggctttggcctctattaatttataccaaatcacattttgaactgatggatttcaaactacaagtacaagcctttgcatctgactcagtggactcttaacactcaaggcaaatttcatccttttttaactaaatgcttgctttcttaattggatgaagcttgcactttgttcttatctccagtatattaacagcatctgaaactatcctcttcctttgtctccctctcctttcctccagcacctctaccttccctttgttatcttaagccggttaaatgtagcaggcacttctcttacgtgctagtggcaacaagacagaattgaagcagatcctctttttaaaaagcagtttccacaagatttatttagatgagagatgactgcctttaaaaaaatacattttctttcccccatgtgtttgttatcagagttgctttgtcttgtgtacatgcaactaagtttatgtgtaaagtaaacatacttaattacaagtatgaaggtgacagctttgttttcaattattgttaagaaaactattcattaggcttattttcagttgggatttagaattccatggaagtcatactatctgtttaaagtgtgtttattagaggtaatgtagtttttgcttaaaacgtagatgtagattgtttgcttagtcttagctgttacctctttaatggttgctgctgtatcgatgcaactcgtctcgtaatagaactatttttgtttggaagtgacagagctagtctaggtaggtattcattctaaactttactcttttaatgatttataattcttgattttgtttttagctgggaaaactcttcagatttttaacattgaaatgaaaagtaaaatgaaggctcataccatgactgatgatgtcaccttttggaaatggatctctttgaatacggttgctcttgttacggataatgcagtttatcactggagtatggaaggagagtctcagccagtgaaaatgtttgatcgccattctagccttgcagggtgccagattatcaattaccgtacagatgcaaaacaaaagtggttacttctgactggtatatctgcacaggtaacattttaactatttttttatgaagaagaggtttagaacacggttgtgcccagaatgcagtttgattttgaaattaggtctttctatactcaatcctgttgaatttcacttattttggaagactttttttttccttcctcccatcccttctcttctccttcctccctcccttctcttcttcctcgctcccttgctatactgacatataatttcagaatgctcttaccaagcgtttttagctcttctgtggagattgagtagaaattgagtttctgtaagaatgatttgggatttattatggagtatttactgcagaatgaatgcttctatacctttttgtttaagacgtatatgaggcatattttaaacatttatgttaggctttaacaagataatgtttggggctgattttaagttaagaagtatcaaatctacagtgagagatgaagtgacaaataattataaatcctgctaaagatgacaaagcattctaattatttcattacttgatgaatctgagagtttttgatttatgggtcttcaaacgttattctctttgatcctttatagcaaaatcgtgtggtgggagctatgcagctatattctgtagataggaaagtgtctcagcccattgaaggacatgcagctagctttgcacagtttaagatggaaggaaatgcagaagaatcaacgttattttgttttgcagttcggggccaagctggagggaaggtaagttttggctttggtaattattttaatgagaacttgtatttggctttctgctatgaattagtcatctaatttcaaaatagccttctcccttcctaagtaattttagtattcacatttgtggtgacttaatttgttcaaattttgcatctagtgatacttgtctaaaatgaataatgttctttcacaactcgttctgttggctgtttatattctttgattgctaaagtgcacatttatatgctgtacatctagagagtttgatttagtaggtgttgcctataattttttttgtttatttgttgctttttgagacagggtgtcactctgttgcccaggctggagtgcagtggcgcagtcatgggctcactgcagcctcgaccttctgggctcaagtgatccctctgtctcagcctcccgagtagctgggactacaggcatgtgccaccatgcctggctaaattttgtatttttgtagagacagggtctcactatactgcccaggctggtctcaaacctctgggtccaagtgatcctcccgccttggtctcccaatataatctgcattttaaataccttatatggcttgatatagaggcaatgtagactacaggtgaataacactgacttaagttagaggttttcaaccatgactacacattggaatcgcctggacagattgtagtactttgtatattagacttagttgcaggtaatagaaacaaggtctggttgattagagcaatggtctgtttagtgaaggatattggatagtttacaacagctggggaggctgtaaaaccaagactgggaaatgaggagaaataatggaaaatgagcagtggtcagggtcccagccaacaactattccacagaactctgaggacacttctggatccatgattgcatttctggatgcttggaaattcgatttgactactatttccactaccagagtagcatctctgaaatcctaatacttttgtgttcctagctccctgttcaaagtctagttttaggcaagatcagatgcccacatcttatgtctgagaggtttggaaataattatttggtgtttggtgctcctaaaacagaaggctggttctaccaccaacaaaacttgtaaagagtatcttccctcttgttgtcccatcaggaagagggtttagattctaggcagaccaaaaaatttgaacttcacttttgttaggacatgtgtctctctctttgtaagtaagcagtttttaaaaattgagatagagattgcttaagatatcatctgtagcctgtcaggagagaggaaacagtaagtaatgacatacaattctgcttaaaatttcacgatagcccctgaattgaggataatgctaccaacacctcaatgtgacagtggtagaaagcactgatatttagatctgaatagatgaaatttaaacagaaaaaaacacatagttttagaaattagatattatccttaaaacataaggcaggacatttattgaaaagttctactagaaaaaagtttcaatgtcattttgaacagtatctggaaacctgtttataggttattgagcctattatttcatacatggtgctatcctgtctgccatggcttttgaaggaagataccaagtttttcagtatggctagtcatcctaatgaaggatgatgagaccctataacattcatatggtatgtgtcttggaaactgaatttttttttgtctgagttcatttctggcatgactaaggaaaatatatagtactttttcattgagattatttacttttctcttgcctggcttatgtgcagcattggatattttaaaccaaaatgttctcatttagtttatgggatgtttgtgattagagagacaactcaaattaggtatatacattcattctgttttagtgtatatgtataggtagagaagaatttaacaacttaggtttctatttggaaatactaaattaaaatttaaagctaggagaaaagtaccattgtaggtaatgtattacccttctataccatttatttcaggtagattatttgaggtatgattatttcagatattcagatgacttttttttttttttttttttttgagatggagtcttgctctgttgcccaggctggaatgcagtggcacgatcccggttccctgcaacctccacctcctgggttcaagcgattctcctgcctcagcctcccgagtatcagctgacttttaaaaatgcatttatcttaaaataatacagatttataggaagctgtaaagacagtacagaacagtcccctgtgttctttacccagtttctcccaatggctacatcttacacagctgtagtacagtagaaaaaccaggaaattgacattggtacaattgtataattctgtgtcattttatcatgagtagataactattttatcaccacagtgatttcccttatgactgtagcgtcacacccactccccctctctcacaccatccctagctcctggcaaccactaatttattctccatctctataattttgtcactttagaaatgttacataaatggaatcatacagtatgtgaccttttaagattggcttcttttttttcactcaccataatgttcatgaaagtttgttcctttttattaccaagtattccatggtatggatgtaaccaaaaccatttaacattgatcttctgtagaacatgttggttgtttccatttgggggctacaaataaagctgctgtgatcaactgctaatgtataggtttatatacattttgattttcttttgaacagttacatattattgaagttggcacaccacctacagggaaccagccctttccaaagaaggcagtggatgtcttctttcctccagaagcacaaaatgattttcctgttgcaatgcaggtattttaagcaaaataaatgactttttaaaaatctctcctcttaaaagaaattaacccaaagactattcatggtagatataatttaagtgatgcttaaaagaatacttttttaaagtttattagtgaagctttgtaaaataataccttggcttttcatgtacaggactaccttaggcctattatgaggtttggctccagaccaccacaataaagtaaataccacaacaaagtgagtcataagaattctttggtttcccagtgcagatcaaagttacacttaacactatgctgtagtctactgtaaagtgtgaaatagcattgtctagaaaaacagtatacatactgtaatttaaaaatactttattgctaaaaaatgttaatgattatttgagcctttagtgagttgtaatctttttgcttgtggaaagtcttttctcaatgtcgatggctgctgaataatcagagtggtggttgctgaaggttgaggtggctgtggcagtttcgtaaaataagacagcaaagaagtttgctgcatcaattgactctttcacaaaagatttctctgtgcattgctgtttgatagcattttacccacagtagatctttcagaattggagtcagttctttcaaaccctgccactgctttattagctaagtttctgtaataatctaaatcctttgttgtcattcagcaatgttcacagcacctttaccagcagtagattttatctcaagaaacctcttttctttgcccatccttaagaagcagctcctttactaggagattacagtaattcagtcacatttttaggctctatttctaattctggttttcttgctatttctaccacatctccacttacttgctccactcaagtcttgaactcctcagtcatccatgaaggttggaatcagcctcttccaaactccttttaatgttgatattttgacttcctcccatgaatcatcagtgttcttagtggcatctagaatgatgaatcctttccagattgaccgttacttaaatttactgtggtgaatcctttccagattcacttaaatttactttgcccagatccatcagatgaatcactgttcagggcagctgtggtcttatgaaataatatttcttaaataagaagacttgtaagtcaaaattacttctttggtccataggcttcagagtggatgctgtcttcgcagacatgaaagcaatattaatctccttgtatatctccattagagctcttgggtgactatgtgcattgtcgatgagcagtaacattttgaaaggaatctttttttttctgagcagtaggtctcaacagtaggcataaaaagatttagtaaaccatgctgtaaacagatgtgctgtcatcagggctttgctgttccatttctatagcataggcaaagtagatttagcataattcttgaaggtcctaggatttttggaatagcagatgagcattggcttcaccttaaagtcaccagcatcattagttcctaataagagagtcagcctgtccattaaagccaggcattgacttctctgtagagaaaatctgttgtttagtgtagccaccttcaatgatcttagctagatcttccatataacttgctgcagtttctacatcagtacttggtttttcaccttgcacttttatgttatagagatggtttatttgcttaaacctcatgaatcaacttatgctaccttcaaatttttcttctgttgctttctcacctctctgagccttcacagaattgaggagagttagggccttaaactagattaggctttggcttaagagaatgttgtagctggttggatcttttattttatttatttgtttatttatttatttatttattttatttatttttttttttgagacagagtctctctctgtcgcccaggctggagtgcagtggtgcgatctcggctcactgcaagctccgcctcctgggttcacgccattctcctgcctcagcctcccgagtagctgggactacaggcacccaccac[142 bp omitted]gcctcctctccctctccttctgcctctccctctcctcctctctccccctctttctttccctttccctctccctctttaaagagataggttctccctctgttgcccaggctggaaggcagtgctgtgatcatagctcactgcagccttggaactcctgggctcaactgatcctcttgcctcagcctccagagtagctaagagtaggtaggactacaggtacatgccagtacgcctggctacttaaaaaatattttagagacaatgtctcactgtgttgccctggctggtcttttttttttttttgacactgagtctctctattgcccagactgaagtgcagtggcgcaatctcagctcactgcaatctctgcctcctggattcaagcgattctcatgcctcagcctcccgagtagctgggattacaggcacccgccaccacacctggctaatttttgtatttttagtagagttggggtttcgccatgttggtcaggctggtcttgaactcctgacctcaaatgatctgcccaccttggcctcccaaagtgctgggatcacaggcgtgagccaccatgcccagcccaggctggtcttaaactcctggccttaagtgatccttctgcctcagcctcctctgtggctgggatacagacacataccactgcacctggctagtgtataacatttttatttgtatttttatttgagacggtctcgctctgtcacccaggctggagtgcagtggcgcaatctcagctcactgcaccctccacgtctcgggttcaagtgattattgtgcctcagcctcccatgtagctgggattacaggcgcgcaccaccccacctgggtaatttttttgtatttttagtagagacagggcttcaccgtgttggtcaggctggtctcgaactcctgacctcaagtgatccacctgcctcagcctcccaaagtgctgagattacaggcatgagccactgcacccagctgtgtataacatttttcttttagagacggaatctcactctgtcgcccaggctggagtgcagtggcaccatctcggctcactgcaacctccgcctccggggtcaagcaattctcctgcctcagcctccccagtagctgggactacaggtgcacactgccatgcctggctaatttcttccgtatttagtagagacagggtttcactgttttgcccagggtggtctcgaactcctgagctcaggcaatccacccacctcggcctcctaaagtgctaggattacaggcattagccactgcacttggcctataacattttaaaagagaaaaaaactgctcatttagatagttacataaattcaaaagtagaatcgttttatttctctttggcctgcaaaacattatctcaatatggcaagtacctagagtttgactttgtctgtggtaggtttcttagatgtgagaaaatgagactgggattacatttgtaagccactgcaccagtgcactttctgcatatcagcaagaaagctgttaggttttcttatcattcatgtgttcactggagtagcactttaatttccttcaagaattttcctttgtattcacaacttggctaggtcaaaaggcccaccattcagcctatcttggccttggacatgtctttttcactaaacttaaaattacttctagctttcgatttaaaaagagaggtagaacacatagaggcaattgtagttattatattggcctaatattgttgtgtctcaggtaatagggaggcctgaggaaagggaaagaaacgggagaacagctggttggtggagcagtcagaacacacacaatatttatcagttcagtttgctgtcttatgtgggtgcaattcatcacaccccaaaataatagttacatcaaagatgactggccacagatcaacatgacagatacaataatgaaaaggtttgaaatattgtgagaattaatgaaaacgtgacacagagacactgaagagagcacatgctgttggaaaatagtgccaataggcttgctcgatgcagggttgccataaaccttccattcgtaaagattcatctgcactgcaaagtgcagtaaaatgaggtatccctgtaatacgtaaactgtgctatctaagttttgaattgtctttcctcttatcagtttcatgttatataagagcttgggatatccatatttaaatgtgctgtagaaatgaaggaaactttaaatattagcttataatttttcaaataaccctcttgttctggaattttaccatctctaaaatggaattagactgaatgtttttattttctgtttgtagattcattattttactaaagtgttgattttctttctgtagatcagtgaaaagcatgatgtggtgttcttgataaccaagtatggttatatccacctctatgatcttgagactggtacctgcatctacatgaatagaatcagtggagaaacaatttttgttactgcacctcatgaagccacagctggaataattggagtaaacagaaagggacaagtaaggaaaccttgaaacttaagcaataaaataagataacctgatgagttgggaacaatcctgtccttttgagaaattactccccaagattaaaaaatagaaaataaacatattactgttagtttttttccaaaaagtaaatagtaactttggatattagaaaataatatatatcaaagcacgatgtaagctgataaaaaagaaaataatatatacctaaaaatagagatgtgtatgaatacaaagtctctctttaatcctgtctcagagaaactggtttatagccatctaggactgtatagatgcattactgtcaaaagaagtgattccccatgcaaagaaacaatttagggtcatatttgacagactatttttttaaggaattttctgttatctccaaggcagagcaattatcaactacagggaaaagaattctacctacatcccttttcctagctccttaattaagcattactattacatgttagaaggtgatatgtttcagtacctcttgtgggatgcctggaaagctaatcagtttggtaggaaaaatattatccgttctaaatttgtcatttttgaaaaacctcttcataccatctagcaagtgattctttatctgtcatcttattattttaattttttttttttttttttttttcttgagatggagtcttgctctgtcacccaggttagagtgcagtggcatgatctcagctcactacaacctccacttcccgggtttaagcaattctcttgcctcatcctcccaagtagctgcaattacagatgtgagtcactgcacccggctaatttctgtatttttagtagaggcgggctttcacca[132 bp omitted]tatgttaattttctgaaaaatggctaaacattttaaaaatactgttactggtcttgccttttactcattttcttccaaattagtatttttcccagataataagcaaaggaagtagatagattttgtttctccttcattcagttaatttttgaaaaatgttatgtatatgaagagacaattcctctagggaaagggagtgcatccctacctacccatgccccaccttaactccagacctggttaggtgcttttgctctgtactcctagaacttagggctttctcctcataacatttaccatacttattaaaattgctcgctaagctgttgcagtcactattcatcattagaaaaagggattgtctttagtaaattatatttctagcaccagtcagtgtctgggacaaaagcagttttaaaaattcagtagctttcagatattcagttatgagtgtcttgcttagaaaaatcaagaataaggctaggctcagtggctcatacctgtaatcccagcactttgggaggccgatgcgggcagattgcctgagctcaggagttcaagaccagcctggccaacatggtgaaaccctgtctctactaaaaatacaaaaagttagccggctgtggtggtgcatgcctgtaatgctagctactcgggaggctgaggcaaaagaatcacttgaacctgggaggcggaggtttctatgagctgagatcgcgccactgtactctagcctggatgacagagcaagactctgtctcaaaaaaaaaaaaaaaaagaaggaaaatcaagaatatattggtcttttggtgaactagattagtgataatttaataatcatgaagttgtgaagccaggggcttttttttttaaactcttaattaattaaaaaaataaaaaaaaagacaggggctgggcacagtgtctcacgcctgtaatcccagtactttgagaggctgaggtgggtggatcacctggggtcaggagtttgagaccagcctgaccaatatggtgaaacctcgtctctactaaaaatacgaaaaaaaattagctgggtgtggtggcaggtgcctgtcgtcctagctacttgggaggctgagacaggagaattgcttgaacccatgaggcagaggttgctgtgagccaatattgtgccattgcactccagcctgggtaacagagcgagactccgtctcaaaaaaaaaaagagagagagcgccagggtcttgctatgttgcctaggctggtcttgaactcctgggctcaagcgatcctcctgccttggcctcccaaagtgctaggattacaggcatgagccaccacgcctcgccactttttgtttctgctgttgtgctgttttaagatagcgcttaaccttaaataatttcatgacacattcttggtgttcataactctaattctgggaacttgttgattgttactttcccttcctcccaaattttatgtgccagctactttgagtaaagagatgagtatttacagtaaccttagggctttcttctactctttgctaaagtctaccaacttggcatattccctgaaggaatgagtaagtggcttctatgggttgaaaaagcaaaatcaattaaagtgatattatagtcaacatctgacttaaattcttaatttgatagaactgagtactttagaagacactggagccttttctgtttcctgtagcagatcttactaaggactggttgctagaaatctgctagaacagtctttaagtatgataacgataaaactgtggattcagtatgtggggaaacctaaggtaagatttgagttaaggttggggctcaggaatgcaaataactataaagaaagtaattattacttcctttaaataagccttgaggatggaggtcggacctatagaagtaaaatcttggaggttgaaatttcttcattttccctgaaaggagtagtagaattggcagggcagactgttacctatctatctatttggttcactgagttctcaagtatttttcaattcttactgatttggggacagaaatttcctatattcatttattcaacaaattaaatacgttttatgctatactaattgcatattgctagtaatacagttaaacaaagacaaaccccctttcctcatgtgaacagtaactgagaaaaaattatacaattatattaggttgagaagtgctgttggggtaatatgagtagtttataagctagggcatatgactagttctgcactggggaatgggatggatgggtagagaaggactccctttctctatggcagttgacagtagttcagcttttggggcaagccagaaaatattctgtggcattgagaggtttgagggtaggtaattttccaaacaagcaattagaaattggcctttactgatattattattattttatttttattttttatttttaattaatttttttttttttttgagacagagtctccctctgttgcccaggctggagtgcagtcgtgccatcttggcttactgaaacctctgcctcctgggttcaagcgattctcctgcttcatcctccctagtgactacaggcgcgtgccaccatgcccggctaatttttatattttttttttagtagaggtggggtttcacc[137 bp omitted]agctgcttgaggattcagtggtccctcccttcattgagtatataatctgctctctaggaatgaaaatgtaattaacgaaaattaccaaaaaattcttgtaaagaaaaatcctaaaattaaaaggagtataccttaaacaacttgcaagtgaaccctaaatgtcatttagatatcatagcttcttcagtgtcattttctgtaggttatcaagattgaagtcctcaagaagttttaaattatgtggagttgtctttcagagctcaattaagtgggaatgttaatttttgatactgactgtgttaagaatgaatagatggtatcaaagcagttagtttggacaatgaagtaagttatttagattatagaatagccatattttaggaaccacataatggcctaacaccctatgacatttgttttcaaatctccttaattttttttctccttgtcttccttcctttcattattttttaatggcagcaagaaaacagctgtcacaatttcattacctttgtgactcagtattaacctgttctaaacagatttggtatcatttgtatccaaatgaacacattgcagctacattttattctttaaattgcaggttctgtcagtgtgtgtggaagaagaaaacataattccttacatcaccaatgttctacaaaatcctgatttggctctgagaatggctgtacgtaataacttagccggtgctgaagaactctttgcccggaaatttaatgctctttttgcccagggaaattactcggaggcagcaaaggtggctgctaatgcaccaaaggtaaagagttatgaaaatgaagttgtcatgacattaatccattgttaatattctgtttcttatattactagaaaaggaaccagcttcctacagataaactgtttttagattacatttgggttacattttcctttagtagaattccttgtcaatgcctctagatttggttaattttctctggatttgattagttttttaaaacccagattgttagaaggatatgtgggtctagcaagcttttgatttacatagatgtagtaatgtttagtcatttaggtgttatactgtttgacctcataaatgatagttactgattttatttccataacttggacatgaaatacatactgtccaattttatagtgggtagagctgtcaaaattaggctgaatttattcttatcacttttgatgttagtttatggtggactgaattaacaccttacattcctgaccaatattcattatgaaatttgtacttaatttaatatgaacttgggataatacttagctataactgttttatgattataactattctcttacacactgacattgtaatttaagttgatgtatttttgattctggataatttttttttttttccaaattctggataatcttataacattgaaccaggggtatgaaagacagtgactaaatatttactccagatggtaaagatttgaaacttcctaacttgatgttaatagatggattcattcctttaagattgacctaagagattgatctctacagggtgtttagtgtgatgtttggatcactttcgaagagcgtttaacatttctccttcttacactttcgaagagcgtttaacatttctccttcttaaagggaattcttcgtactccagacactatccgtcggttccagagtgtcccagcccagccaggtcaaacttctcctctacttcagtactttggtatccttttggaccagggacagctcaacaaatacgaatccttagagctttgtaggcctgtacttcagcaagggcgaaaacagcttttggagaaatggttaaaagaagataaggtacgttaaattatgttgacataatcttgctttggttgcattaaatatgatattggcaagttaaaatcatttaggctgcaccacaatgtctccattactgctggtagaaacagaacaaaaacacacattgcataagatggattcacttatttccttttgaaaaaatatatattttttcgccgggcatggtggctcaggcctgtaatcccagcactttgggaggccatggtgggtggatcacctgaggtcaggagtttgagaccagcctgaccaacatggagaaaccccgtctctactaaaaatacaaaaatcagctgggcgtggtggcaggtgcctgtaatcccagctacttgggaggctgaggcaggagaatcacttgaacccgggaggtagaggttgcagtgagttgagattgcatcactgcactccagcctgggtgatagaacgagactcggtcttaaaaaaaaaaaaaaagttggatcttagtaagacaggatggctatctaattagcaatgagatactgtttcccagagatttcacagaatgttagttggtgttacatggaaaaatatttaacttggtttcttgaaatttatttaaatatgaaccttttctaaatgttaactagctttctttactgtaggtcttctccatgccttttatattcactcagtacttatttctctttacagagagcatataatggtagtatgttttcctgagcacattattccttatgtggaatagtgactgagaaacagccaaaggatgttgtttgtttctaggataacaaacaagttttagctgtccattagtgttaattcctttcacaccaccacataaaaaagcctttctcctcaaagttgtagtatggaattgccattgtcaagaactgaagtagtattgtttaaagcactctgaatagtgaataacatttaatgttattattctttcagcgttagtatatgttaggactgtttttatattattaattctaagtccttgtttcttgacccagtttctggcaatcttgtaagataccagagaatactacatcagatttgggatacttggacaggagtctctgatgaagaatagccacactagcgagtatttgaggtccatcctaattgattaagataaggcagggctgagtttggtggcttacgcctgtaatcccactactttgggaggctgaggcaaaaggatcacttgatgcaaagagtttgagaccagcctaggcaacacagcgagaccttattaaataaatacacaatattttttaaaaagataagggagggtgagaacagccaaggtaactgagttgacctacgtaacagggtgaaagctttttaggtatcattatccttttctgtgaacagtcatatgggaccatttgtggtattaataaaagagacattaatcaactattcattagcatgttcagttaagattatcgactctgatacaactttttatttttggcactaaatatcatttataagagctagtccccaaagtagaaaatctactatagtatgtaaaccagaactcttaggaaatgaatttccagattgggcagctgaatgagtaaggcagactgaataacacagaagacagtatctgcctgtatactacctaaaaattcttaagagtgtccttcctgccctataagcttaaatccaagtcaagaagatagtggtgcttagatccctcagacatatataggttacactgtgagtttaataactgtccttatggtaaacctcatctggctccttcattatcaaattttcagttgataacattacattaaaagttgctttttgtttttgaaaaattggggccatgtgatgtgagtctgatatctgaatattcttagtagctagaagtacaagaggtacaagattgtactttgaagtacttaaatccttaacaaggtagttgatagtatctataagattgcagtcttggtgagctttttatcgttaaacaggatttgtggagaattctactgagacattgctgtgaacacaagattaagagtctaccaaccacaacccctgcatatttataatatattctgtgaaactaagtacctttcatactagttattacttatagtggacatagtgtcaactgctcatttctaaaacagttcatggatcactaaacaatctctttttcctttggacagctggaatgttctgaagaactgggtgatcttgtgaaatctgtggaccctacattggcacttagtgtgtacctaagggctaacgtcccaaataaagtcattcagtgctttgcagaaacaggtcaagtccaaaagattgttttatatgctaaaaaagtgagttcaatgaaacacattctcagcatgaattcattgaagcattgacagagaaattagcctgtattaactcttgattactttaatagtgaatttcctttcattttgatttactttgaaatgtataaaaattctcttacccctcatatcaaattcatacttgttaaattgagaaaattacttttgcatggcttatcagaatttcagatagcaggcacgtttaacatgttagaacaaacttttgaaatattcatttattgaaaatggataagccaggccaggtgtggtggcttgcgcctgtaatcccagcactttgggaggccaaggcaggcagatcacttgaactcaggaatttgagaccagcctgggtaacatggtgaaaccttgtctttactaaaaatacaaaaaagtagccaggcgtggtggtgtgtctgtggtcttagctactcaggaggccaaggtaggaggatcacttgagcccagggggcagaggtttcagtgaatcgagattgcacctctgcactccagcttggatgacaaagcaagaccctgtctcaaaaaaaaaaaaaaaaagaaaagaaaagaaaagaaaatggataagccagttataaaaattgacagatgtttgttcaaatatgtcatcaccaaggtctaactgggcaccttaaattgaaaatgaatttgtgctttcaccagtagttctatattagtgagattttatagtagaaaaagtctttaaatgctataaaattgaaacttaggagcagcgtttaagtctttgtttgtttataggttggatacactccagattggatatttctgctgagaaatgtaatgcgaatcagtccagatcagggacagcagtttgcccaaatgttagttcaagatgaagagcctcttgctgacatcacacaggtaatgtgattaaaatatattttgtagaagctgattgaaatggagagtgggggccagccatggtggttgacttgggagtccaaggtgggagtattgcttgaggccaagaattcaagaccagtctgggcaacattgtgagaccctgtaactacaaaaaatttaaaaatcagctgcatgtggtggcacatgcctgtcgccccagctactcgggtggctgaagtggagggatagcttgagcctgggaggtcgaggctgcagtgagctatgatcgtgccattggactccaacctgggcaacagagtgagactctcaaaaagaaaaaaaaaaaaggaaaacttacagtttgtagaaattaaagctttgtcactctatatggataaacctcaaatgccttgcaaaaaaagcaagttgcaaaagaatggacagtatgaaaccatctgcatgtagttttaatacatgcaaaacaaacatcttatttagagatgtatgtgtattaaaaatatgaaaaatacatggggatgataaaacaggatagtggttgccactgggtgtggggagagggaagagatgcatttgtaagtgtgagtcagagtccttcatatttatgctattggttttctaaagttcataaaaataaaggtctgtcaggctgggtgcggtggctcaggcctgtaatcccagcactttgggaggctgaggtgggcagatcacctgaggtcaggagtttgagaccagcctagccaatatagcgaaaccctgtctctactaaaaataacaaaaaattagctaggtgtggtggcagacgcctgtaatcccagctactcaggagctgaggcaggagaatcgcttgaacccgggaggtggaggttgcagtgagctgagatcgtgccattgcactccagcctgggcaataagagcgaaactctgcctcaaaaaaataaaataaataaataaaataaaataaaggtctgtcggttcagttgtattctgctgttatgtaatatcttgaaatattttgtagttgtttttatcagaactcaaaataactatgatccctagaggacaaaaatttgttcttaagtgtttatattgtccaaataaaattctcaggtaaagaaagagttcatgcataattttgtctacatactctccatagtatcttaaaacaatttcttttaaatctttttttgtagattgtagatgtctttatggaatacaatctaattcagcagtgtactgcattcttgcttgatgctctgaagaataatcgcccatctgaaggtcctttacagacgcggttacttgagatgaaccttatgcatgcgcctcaagtatgtgttttaatgctttttaggcatgtttccaacattgttttagtaattgtgcagcgcctctcagattgttatgcaaagctactgaggggcctactccttattaaagaaaatgtagctattataatattcttttgtactttaacagttcactattaaaccttaatctgtaatacggatattgaattactcatgtaagtggagtggacaataaacttgccttgtttgtggttttacaggttgcagatgctattctaggcaatcagatgttcacacattatgaccgggctcatattgctcaactgtgtgaaaaggctggcctactgcagcgtgcattagaacatttcactgatttatatgatataaaacgtgcagtggttcacacccatcttcttaaccctgaggtatttcagtttcttacctaatagatggtgttagttgtgattaataggtacactgaaaatgtgtttgtggtactaaatattaataatttcataccaccatgaggttcaacattatttcatttattcattcattcatttattttgtcttgtagtggttagtcaactactttggttccttatcagtagaagactccctagaatgtctcagagccatgctgtctgccaacatccgtcagaatctgcagatttgtgttcaggtggcttctaaatatcatgaacaactgtcaactcagtctctgattgaactttttgaatctttcaagagttttgaaggtaattaggagtttttgagtttttaaaaaaagtacttaaggtagccaagaagaggtatgcttatgatcaggctgttggaaattttgtttttctaaaaatttggttctatgggacattttaattttttaagttttattcaatatatgtcaaggcccttttatgttggattctaaggatatgcagtgaaccagaccatctgtttggatattttatagatgaattaaaggtagaattttaagagaaaaatatgtagtggtgttgaaattgtataaaatgaaaatacaggttgagtgtccctaatctgaaaatccaaaatgcaccaaagtccaaaacttcttgagcaccaacataacgctcaaaggaaatgcttgttggagcatttcagaaatcggattttcagattagggatgctgatcaggtaattataatgcgaatattccaaagttcaaaatctgaaacacgtctggtctcaagtattttggataagggatactcagtctgtactaatgatcaggtataataaaattttatgcttatatgtctgactcttataatagcaggtgattctcactaagggcattttgtgatttgttgctatttagcaggatttcttaaccttagtactatagacatttagggctggataatcattgtagaggggtgttcctgtacatgtagaatatttagtagaatattcagcagcattcctggtttctacccactagattccagtagcgtcagctccaccagttgtgacaaccaaaaatgtcttcagacattgccagtgtcacctgtgaggaaaatcacctcagttgagaaccactgctatacagggtactaacgtaatcactgttgggtgtctaacttctggtccccaactgcctttctctcctctctgtactagtagtactctattgagaaggggtaagagagtctagtagttttcttaattttttcttaattttcccagtttcaaaatgttaactgtgcactaaatttacactgtttagtacagtcactagccacatatagtagctatttacattgaaagttattaaagtgaaataaaatttaatatttagttattcagtcactctagccacatttcaagtgcttaatagccacatgtgtttagtggctattatattggaaggcaaagataagattttcatcattgcagaaagttcttctggacaatactgcactaaattcttcccaaattattttgtatgtttcctataaattgcatattgaaaaacaccaggtattggggtcttcatttaaaatttcccatataggggcacaatggtgtatgcctttaataatcccagtgctttgggaggccaagtgcttggggccacaaattcaagaccagcctggctagcatagcaagacaccatctctacaaaaattttcttaaaaattagcctggcatggtggcatgcatctgtagttctagctacttaggaggttgaggtgggaggattgcttgagcccaggagtttgaggctgcagtgagctatgatcgtgccactgcactccagcctgggtgacagagacctgcctcaataaaaaagaaaaaaaggaaacattgggttgaattgtctattcttcaggattaaagtgcaatccattttactgatctgattaatggaatagttagtatttttatcgcgctttttaagcaaccaacttatatttgggagtattcaatataacagttttttaattacataaatgtttttcagtcattctcaaaagtgtgcctatgcttaattgtaattacttgtttctttaaggtctcttttattttctgggatccattgttaactttagccaggacccagatgtgcactttaaatatattcaggcagcttgcaagactgggcaaatcaaagaagtagaaagaatctgtagagaaagcaactgctacgatcctgagcgagtcaagaattttcttaaggtaagtggttttgagtaatgtgttttctggttggattccaggttagcagttctacaagggtttggtcatagttcaaaaatattttttccctaaatgtgaagttgttagcattcttaagttgtgtgctggattatttcttccaaacataatattctgtggtttcctttgaaatacggaaggaaattggtgagtaagaatgaccatctgtttaaaagaagaaaaaaaaaatagcactatttcaaaggaatttcctttattttaattttggatggaaaaatttagaaaagtggttgtatactttcaatgtcattttagaatcatttaggcttttgaatattaacatcagcttgctcttcataccattttgaggagcctctattgtaggcaaagggatctgttgtctaaggaatgtataggtttacctctttcatcaagtttgctcaactctagaaactaaaatattgttattcatatataattcataaaggtaagatcaaacaaaacgctcagctttgtgacacattaaatcagttagagaggagtaaggaccacctgtgttgcagggaggagtaatggttgagagattctgaactctagaacatccctaagggcagttaattttgtttaatgtttaacttagctttagctttattcttgtaactgccagttactttgtgatggaaataaagctttaaaattgatagctatctataaaaggctaggaaaactacagaacacttagattactgctctctcactgcctattatgtgtgtgtgtgtacactatatatatatataatgattcctgagactttatagaaagttctgaagtattttttgtcttggaagaattttacattacaagtaaaaccaaaatgtttttgtagaacacagtatagaaagtaggcttttcctactcccagattatcatcatttgtgtgtgtggttgcattggcagattgttcttttgaagaatttactacctgggctctagattaaatagcaaaacccttaggggttttagtgtaatgaagtagtcaaaatgttgaaactgctctacattttagattaaaagatacacttttcaaaaaagtatagctttaaaatgtcttggccatcatgaatattctgggtaacctagctgtgctatgtttggaccaaaactttctggtgtcaaaaaacccctccaaatgagaaagatttgatactctgtgcttgactagtgtacccatactactgattcacttccttctttgagtatcattactatttcctttaaaaaaaacaacaacaaaaaaaactactactagattcttttgggggcagggggtgttgggtttttttttttgtttttctttttaagcttttaagttcaggggtgcgtgggcaggtttgttatataggtaaactgtgtcatgggggtttgttgtacagattgtttcgtcatccaggtattaagcctacaacccattagttattttttctgatcctctccctcctcccatcctccacccttcagtaggccccagtgtctgttgttcctctctgtgtccatgtgttctcatcatttatctcccacttgctagtgagaacatgcagtatttggttttctgttcctgtgttaatactaccagattcttaaatgatttctttttgtttttattgagccctcagcttctatgcttaaattgtaacttctttagctttggattttaatatttgagttatatatatatggaaagcaaaatgaaattagctattatttaattatcacatttttgagctttaaaaaaaatcctctagtaaagaaatgaaaaacaatcctctgggtactaggatggtactgccttaggtttgcatagcccatgggatctaatcagatgaagatttcccctccacacttgtgaactgggtacaagcctgatatagtaggggtgtggatgtggattatgagcttttgagtcagtcagacctgtttcaaattctacttagccattgtttgttcattcagtatatgtctagctgttacctcaggcaagttaatgaatatgcctcagcctcagtttcttcaaccataagctatgtttatttatcaagtaccttgtatactatagatgtttaggcagtaactattactgataagtgataagccttggaaaaaggtggagtcagcctaaatgggatttctgtcaggcaagtatttatttctctttgatatcaatttgtacttgactctttgaaggaatttacttccagccaggattagaggtgaatttagggtcttacgtctacataatttgacatgggagctcaatactaagatgcaactatcacattcatcctctgatgccagtgttgagagtgaacttattagattccttgttaacctccagtacagggttatgatgcctcttatcactgttattaaacttaattttagaggtactagctacatgataatttactggtgttgtaagtaaaccctgtgtcataagaaaaataccctgactctgatcttgaatattcaagtgccaattgtgtgttagccaccaggaataaagagattggtagaacataacttctcctttaaggtaccctgtgagcaggataaaattgtgtcattagcatcatttgactcatgccctaagtttgtagaactgtaagctctctgtagaaagcatataactgttcatcagacccatgatctgctccttgctacctttgatcttattttctacctttctttttttctttctttcctggtttagcttcaaccacactggcctgctagctattcctggaactcccctaaccttgtcctgccgaagggcctttgcttgtgccctgtactactattctctcatgaccttctttctcctttaccttctttgggtttctgattgaatgtcagaagagaggatgtctcaggttgccttgtgtaaaatagaacccattcctaccccattttgcttgtttttctttataacaccactatgaaacgtctcctcccactagaatgtaagttccttgagagaatggactctgcttcctttgttccctgctgtatctccagtacctaagaacagagtctgatacttgggtactcataaatatttgttaaatgaacaaatttatgttgaagaaaacctctgactatgctaatataatttcaagtttgatcttaaaatctttaaccattataactggaggttaattaaacatttagtaagtaatttaatattattaaaatgttaacatttctaccatgtataaaatcatgtgcaaattttagcaatcaagaaaataacctagattttgtctactttttaaatctgaaattttcttttggaatacagttagtattccacaaaagtggaattatttgccacagaaattttaacacctatgcatgaaaacagaataagtaatcctagattatctgtaagtgataaagataacaaaaatattttatatgtgtataggtaagatgactagtgtgttgatccatacttttttgatgttcatttagtaggaaaaacatgacatactaaaatttttacatagatagatgcagacagattctagaaatgatcgtaacagctattagtgcagagtttccatggtgttaaacaatacttattttagaaaaccttccttaatgtggaaaatctgcagctttacagacatttttattttttaatttaggatggctatattaaaattaagatttaccttggtgttcttgggacacttcatagactagtcttcgtattatttataatcgagtaactaatatcccctagtctcaggagccatttaattctaaccttgaaaataatgttcttagtggccatcactggggaaagttctaccctacttagttctgcttccctagtagactgtgttagaggaatcatttattgaggaatgtttcactgtgtataaatgaattcctgatggaaactgttgttttttgtgctctaccttatgtctgtggaatgtaacaggacatgtatcaggtaaatgcccagtacaggttttacttacctgtctataacatcttctatgtcagtctataagtaggattgtagtttggtatctgtaatggaatgataaaagcagttggcaatttaaagatatcttttctttaaatgctgggtttttttttttgtagggggtgggttttcttatggccacatgtggtcaccatcatgctgctccttgtaggctttgttataatagagtattagaggctggttgtatagattggatgtggggagggatagaaaatcattagtttgaaacaaatgtaagccatttatgccatatgtttgacaatgtgactatagttattaagttgattttaaatacggtagaagtgttattaccagtgaaagtcccagtatggtgaatttatcatctgagagccactggctcaggtatcttaatttgttactcttgttttttggtaaagggtgtgtatgggaaagacttggtatcttgctgtgtgaatctaagtattgcttagtaaaaatttactgaaactgggatgtacacactcaactattgggacattctttctttaacagaagagctatgtttgtgtgagcctctcttgttagcgtagaacaaattctcatatgttacacagatttgatacctcatagaagaaatttaaagtttccttttgtttgtctttttttcaggaagcaaaactaacagatcagctaccacttatcattgtgtgtgatcgatttgactttgtccatgatttggtgctctatttatatagaaataatcttcaaaagtatatagagatatatgtacagaaggtaagtaatatgtaggtaatgtaaaggtataatcttactatagattttatttctcatattctggaaatccttttgaaactctgtgctcaataagagtggtctgcagcttttaacgtgggattttttgtttttgtttttgttttggagacagggtcttgctctgtcacccatgctggaatacagtggcacaatcacagctcactctaaccttaaactcctgggctcaagcagtcctcctgccttagcctccaagtatctgggactgcaggtgcatactaccatgcccagcctgcttttaatactttttccccagcagaatcctttcttggaataaaattctacgtgcttccctagcaagccgactcagggaagggggaaaaaaaaaacatgcatgccaagtgtgtaaaatataagaatagaactgctattattgaaaaagttgggtggcctagggccttactaacttgatagaccctgaggtatccatgtagactccaaagcagagttttcaaaccatcttaaatacagatattagataattcaccttctaactgtagaaacaggcagtattgctataatgggagcctttttattagacagtcttgcatagtcatctttgactgtatcttctttggacttatttatcatatggaacaatgtttcggtaactaaccaaaccggtagagacagaatatagtatatgtgctttcaatacttattaaaccatgaagtcttgtttttagctggacttcctgctaaattcctctatctagttgcaaatttagaccctcagtttattactgaatttaaaaactgaacttaaagaaaaaaaaactgagcttaaaagcgatagagataaatgcttttttaaaattcctctttgcttttaataacataataacattcttctacttctttttaaccacaggtgaatccaagtcgacttcctgtagttattggaggattacttgatgttgactgttctgaagatgtcataaaaaacttgattcttgttgtaagaggtcaattctctactgatgagcttgttgctgaggttgaaaaaagaaacaggtgtagtaccattttaacagggataagttactctttcttaacatggcaatagataaaaatataggtagtcatttgttccaaagctactaaataacacatggagaataatttcctgaagacacctaacatagaggtgataagctagctaatagcactgggaaaaaatctgttttctgaaacattatagctgtcataggagatctgttaacttggttgatcatttttttggcatgtttataattacagctatgtggtttgactttatatgtttttatataaactatgtactaagtctcctgtttaggtgtgatacctgtgtatttaacaactaattctgtactgatcaatcatgtggtgtttccaacctgagaaagctgattaaaaaaaacagtgtggtgtttaagtgtgaggcaaaagagttccctgtgcaactcttgagttcaattgatatttaatttacagtaccttaacatgataatatggatttccaatagaatatagtataagtgcttctaaaacttacagactgtgaagtctttttttagctggaacgttctgaggaactagtgtttaggaagtactgatgtaaatgagtttggtgaggtggtatgctagtgggaagttctgctgtttatgagaagaaattaagaaagtctgtgggtttcattttaacctgagttgatataggtgatctactaattatattcttagaatttatattagaatgtttcaaacatggaaaaattttgcatttaagggtaatagagatatgcagttaatactgacctaaaggtttgagcctagtttcaagtgattttatgtcataacaatttaacatttaataagaggttcagttgagtctgaacctattgaatctattacctgaaaataatcttactgcatattccaagcaaatggcagttacagttagataatttagtctttaagtgacaaattatattgtgaaaagctagattcacatctaagtcactagtctagacatgcctcagctaatttttattccttaagttgacatggcgtatcttggattgcacatgtttataggagctggatttttgcctctatttattaaaattgtcttctccctaatgggagggttcataataaccatgtgaatttgatatagccaaaataacgaataatgctttttctctggctgcttttaatgtttaaatcattggtaaaagaggcttgggccaggcgtagtggcttgtgcctgtagtcccagcttctggggaagctaaggtgagaggattgcttgagcccaggaggtcagggccgcagtgagccctccactgcactccagcttgggcaacagaagaccctggctttaaaataaaaataaaaggaggcatggtcatcaggactatcgaaacaagctatagtatagcaaaactgtgctccttgatggagtgtttatatgacagctgcaactattaaacccagagcttctaaagctatcagattttattcccaatatgtatttagggtttggctgtaggtaatgctgtatgttaattgtgttaaagctgaaagaactctcagataatctggcctatgtaatatcacatccccatcctatccacaaacaaaattttctgaagtctagatattttgtgtgttataaagaaaggacactgtatgaatctctaatcttttattcagatataaggaggtaagtatatcatatagcagataaacctgggagagtgaaaaatagccttatataccttctttttattcttggacaactcaatcatattttgagtcttaatttcccaatttataataggatcactgataattaaaattaatgtaaagccaggtacagtggcttgcacctatagtaccagctactcgggaggctgaggtactaggatcacttgagcccaaggctgtagtgcacaatgattgtggctgtgaatagccactgcacttcagcctggacaatgtagcaatactcggggggcggggaaaaagtatgtgaaagcacattatagaccataaggtatttacatagttagcatgtcaagagtgtgttatttataatacagtatgtgtgtgtgaggtttttttccttttttcctagattgaaactgcttctgccttggctagaggccagaattcatgagggctgtgaggagcctgctactcacaatgccttagccaaaatctacatagacagtaataacaacccggagagatttcttcgtgaaaatccctactatgacagtcgcgttgttggaaagtattgtgagaagagagatccacatctggcctgtgttgcttatgaacgtggccaatgtgatctggaacttattaatgtgagtactgctagctgaatatgtagagaagctgcatttttaaaaacctgttacatgagagtttcagggtaattttaggtaatatgggacatttggggacggtgggtgcttttttaaaactttatttggaaataattgtgaatctgaaagtggccaaatagtggataaagtctatataccctttattctgattgacttgctaatgttttaaccccactagccttaccatttgtgttctcacactcttacactcaggcacaccattcatacatatgtgtatacacacacatactattttttaaccacgtgggaataacttgaatgcatcatggccttataccccttccgagtgtatggcctaagaataaggatgttctctttcattaaccacatgaaagataccagcttcagtcagtttgacattgataggatacctttaaaaatctgttctattctagttttgtcagttacccaatgatgtcctttgtagcagttttttcccctctagtctaaggtcatatatggcatgtagttttcatgtctttagtctcctgtactttggaatggttcttcagtcttttgttttctatgacgctgatatctttgtaaacaatagttgctttttctatttgtaactattttatataggtgaaatttcaagcaacatcaaattaaccattttaaagtgaacaattcagtggcattcagtatattcacaatgttatataatcacctttatctagttacaagttttcatcacttcaaaaggaaaccctgtattaattaaacagttcctccacataccccctcctcccagcccctgacaaccaccagactgtactgtctctatggatttgcctattctctatatttcatctaaatgtaaagtctctttttaaaaaacagaatgtgtctcactttgagttcctctgatggttcccgatgattagatttagattatacatttccacccagagtactgcttcagtggtggtttgtttttctcttggtattatatccggaagcacgcagtgttcatttgtcccctttgtcagtttttatcaagttgtaacatgtctttattacataattattaccctcttggagatattaaacagtctataagtagtctgtagtagactatgcaaatatcctcttaccctctcccttaatttagcatctgttgattcttgcttaaaccattcttaatgtgttggttgcaaaatgaaaatttttcaaactccagcagtttctccacatttgtcagttagcactcatgcattcatgaactcttggattttattcgatgggctacaattcactactatttattttgatgctcaaattgtcccagttttgactggtgagaacctcttcagtctgtgtctttgtgtcatgggctcatttttctttgagcactaacttattttctggcacacaatacaccaagctcattttgtaccttcagcagccctgaagtcagtcatttccctagggaaccttttactggggcattagaaaccaagatctgggccaggtgagtggctcactcctagaatcccagcactttgggaggccgaggcaggaggatcacttgagcccaggagtttgaaaccagcctgggcaacatagcgagccccccgtctctacaaaaaattacatgattagctggggggaggtgccatgcacttggtttcaagctacccagaaagctgaggcaggaggatcacttgagcccaggaggtcaatgttgcagtgagctatgatcgcaacactgcactctccaaccttgacaacagagcaagactcctactttctgaaaatattagaagtcaagatctgagctttagtgtatttgcttctaagatctttcagtggtcagggcttagttacatttatgtacatacatatgctcatttatgtacatacatgtgcatatacgcatggaaaaataaacacacaagaacagctagtaaaacactgaaaactgtaaaagtggactagtcctaccagatgttgaactgtgtattacaaagtctatataattaaaacagtatattactggtacatgaatcaaagtccaaaactagatccaatatcagtaagattatcaataaacatagtttaaaagataggaaataccctctaaaatgctataaaaagtcctttactttttaccttgaaattaatctatcatatcttctttaggtttgcaatgagaattccctcttcaaaagtctttctcgctacctggtacgtcgaaaggatccagaattgtggggcagcgtgctgctggaaagcaatccttacaggagacccctaattgaccaggtaacattggcaaatgtgtttatggctgtcagtaaaaattatacatttttaactatgaatacaatcctttccctcatcatgtactcaaatggatcatatataactatgagagaaagcaatacaaagtagaagaaaattaaaatttatatatattcaatttacattcatttgtatataatgaatgtaaattgattatatacattatatacaaatgaatgtacatttatataagtataaatatgtatataacatacattaagaaaaataagccatgtgcggtggctcacgcctgtaattccagcactttgggaggccgaggtgggtggatcacctgaagtcaggagttcgagaccagcctggccaacgtagtaaaaccccatctctactaaaaatacaaaaattagccaggtgcatgtaatcccagctactcggcaggaaaatcgcttgaacccgggaggtggaggttgcagtaagccgagatcacgccattgcactccagcctgggtgataagagcaagactgtctcaaaaaaacaaaaagaaaaaagaaaaagaaaatacatcccaaaagacctgacttaattatataaaactctcttggttcatcatagtttaaaaggaaaataacaaactaaacattaaagattgctattattaacacttaagtggctaaattgattggaaacttcaagataataagtcagaaaaatataaggataagagaaaatacaaaagaccaagtgcatcagtgttatatcttactaataagaagtatagaactgcaaatgagatggggttttatacctaaataaaatagacaacatattttaaaagttctaaaaatagaagagttgttataatgagtcttaaattctcctgagataagtataaataaaatattttggaaacgaataggttgaaggctattaatatttcattcctttcctaggaagcacttctaagcaacattcccaagtagttacaaagcttcctaggggaaggttgtgggggtgggggcgatggttggaaatcattgcagcatctagaaaaccaagcaaatagccaaaaccagacgaattaccgatattttaattccacatctgtgtagctgaattttgaattatgtgtagccattaaagtgataatgatgattgctagcctggataatgttttaatcagggaaaagatagaaattatataattagagtaatttttcaacacaattatacatattgtatagatttgtgtagaaagacctctctatgtaaatttaaaggtctttttcctacttcattcttttctgcctatttcaagttttctaatgagaggccaacttacgcttttttaaaaccaacttgattctcagtacttatgtcccatatatcctctgtaggttgtacaaacagctttgtctgagactcaggaccctgaagaagtgtcagtaactgtaaaggctttcatgactgcagaccttcctaatgaactcattgaactgctggagaaaattgtccttgataactctgtattcagtgaacacaggtatgctttcagagggatccattggctatttatagtcagtctttaataaattatggcccatcagttttgggaaggaacaaaaagatcagagaaagttgcctgaattctcactcttctaatatcctcccccctaccctacctcttgagacaaaaacctctccgttagtcacagtggttattttttatgtcggataaacttaaaatattgcatttaaaatattcttttttttcttaaaggaatctgcaaaacctccttatcctcactgcaattaaggctgaccgtacacgtgttatggagtatattaaccgcctggataattatgatgccccagatattgccaatatcgccatcagcaatgagctgtttgaagaagcatttgccattttccggaaatttgatgtcaatacttcagcagttcaggtaaatcttcagattacctaagttgaattactaaacactgtgctatgagggtgggcctaattggttgctacggcaatagagcagcaataaaatactaacagcttaaatgtaattgctttgggtaggattgattttactctaaccctaatttcaaacttggatacttaggtcttaattgagcatattggaaacttggatcgggcatatgagtttgctgaacgttgcaatgaacctgcggtctggagtcaacttgcaaaagcccagttgcagaaaggaatggtgaaagaagccattgattcttatatcaaagcagatgatccttcctcctacatggaagttgttcaggctgccaatactagtggtatgacttcttaccttatgtattgaaacctcataaaatgattaagctaagcattaagatatctgtctattctgaattttagaagagttggatactgcatggtttcttttagtgctccatcttagtccagataaaaagaggctgtattttgtgaatttgtaagttcacaaaacttacaagtggggaagatgaatcttctgtttttgaagtctcataaaatcctgatagtgctctaatcttaaaactttaaggaaaaagaattcatctattcatttggtccgtgataatacagaagtgaaatattgcacggtttacatttgtcattatccatgtttccttgaaaaggaaatgaatgcaattttcatttacttgggtgaaagataaactaggatgttagtgtttggatatattttttctttttctatacttaggaaactgggaagaactggtgaagtacttgcagatggcccgtaagaaggctcgagagtcctatgtggagacagaactgatattcgcactggctaaaacaaaccgccttgcagagttagaagaatttatcaatggaccaaataatgctcatatccaacaagtgggtttccttttcagatttaagaaaaactagttgggctacttgattagcttggtaggatcaaaacatcataactgaagaattccaaggaaaaatctataggaaaacaaattctttctcattgtgaagatatcaatttgaaaagaggattaagctcacactaatatcttgctgaatgtgggttacctttttttttccaggttggtgaccgttgttatgatgaaaaaatgtatgatgctgctaagttgttgtacaataatgtttccaattttggacgtttggcatctaccctggttcacctgggtgaatatcaggcagctgttgatggggctaggaaagctaacagtactcgaacatggaaagaggtaatctaaacccaagtttgagtgaagaattaaagaaacgctatttaaacattagtttaaataactagccatgttttacatttgagttcacagaaaggaaatgtttattctaggtctgcttcgcctgtgtagatgggaaagaattccgtcttgctcagatgtgtggacttcatattgttgtacatgcagatgaattagaagaacttatcaactactatcaggtattaacgagacttttatatgacctgagatcttttaccatagatattcttatctttaactgcacatttctcttgttcaggatcgtggctattttgaagagctgatcaccatgttggaagcagcactgggacttgagcgagctcacatgggaatgtttactgaattagctattctatactctaaatttaagcctcagaaaatgagggagcacctggagctgttctggtctagagtgaatattcccaaggtaaccagtcattgtaacacagtgaagcaactgtgtagttaaaactaatgcttcaaaatatcttattctttttaaggctgttagctagactcatatctaaagcaattaagtctttcttatgcaggtgctaagagctgcagaacaagctcatctttgggcagaactggtgtttttgtatgacaagtatgaagaatatgataatgccataattaccatgatgaatcatccaactgatgcctggaaagaagggcaattcaaagatatcattaccaaggtgtgtactttcttcagaagataaaggattcagaaggagaaagctcattaggaagtaactgacttatgtatggattttcccattgtaggttgccaatgtggaactatactacagagcaatacagttctacttagaattcaagcctctgttgttaaatgatttgctgatggtgctgtctccacggttggatcacactcgtgcagtcaattatttcagcaaggtaaagtaataattttaaaccaaagcttcatagcaaggaattaggacatacttcgataacttttgtccctgggacttcaataatgtgctatatttgtaacaaactctttattttaaaggttaaacagctaccactggtgaaaccgtatttgcgttcagttcagaaccataacaacaaatctgtgaatgaatcattgaacaatctttttattacagaagaagattatcaggtaaaaccttttgattcttgcacataatctcaagactcataaagttatgttttcccattttttaaaaaagccattatcctttaggattgtaaacagtaggtgcttgcatacctaggatctaaatttagtaagatttcaggattgataaatcttctaattaagtgccaagttttcagaattttgctcagatcttgtataagatactgcttttgaaaaaaatgatatgattactttatctctaacatctagattgtaggtagagtcaaaaatgtctttgaccacttaactaattcataaaatttatttggtattaactatatttattcaccatttttcttgcctactgttttattagtgtttgtataaactttctcttatgaaggatttcacaagcaaaagtgaagtagagttaagcttaagctacttgcctttttttctctctcttcattttctttgaggctcagcgcatgcagatctgtactgctgccatgctgagttttatc[180 bp omitted]ggtggcacgtgcctgtagtagcagctactcgggaggctgaggccggagaatcgcttgaaccctagaggcaggttgcagtgagcccagattgcatcaccactgcactccagcctgggcaacagagggagactccatctcaaaaaaaaagaaaaaaatcttgccctccaaattagaaatattgtccatttcatagccatatgttagtccttgatagtgaaaatcttggagaaaatggtatctttaggtaaaatgaaaaatcataccttttgatgcttgaatctaggtgtcatattacatgttaccatctaaggggctcattgattgagaacggaatataatgttaaacaaaatactgatctggcatttggatggctttttttttttaaggctctgcgaacatcaatagatgcttatgacaactttgacaatatctcgcttgctcagcgtttggaaaaacatgaactcattgagttcaggagaattgctgcttatctcttcaaaggcaacaatcgctggaaacagagtgtagagctgtgcaagaaagacagcctttacaaggttgataaagttgcggggcaggggctgttttaaaccaggcctaaaatggtgttacaagtgattataatctataaataaaagtattggttttgtgaatatgagagctgactttaaggcaatttaagttaatggatttcttgattctaggggctctcttatgttaaggtcaaacttgtctggggaaaaaaaagcttttagcttatctcttctttgaaaattttaatttaaatgatacaactaggaggcttttttccccttgcaaaaccagatttatattggaaagtttccattgtttttcttggtttactagttcagtatgtggggtctaatgtttttgactttcactatttctttgaataggatgcaatgcagtatgcttctgaatctaaagatactgaattggctgaagaactcctgcagtggtttttgcaggaagaaaaaagagagtgctttggagcttgtctgtttacctgttacgatcttttaaggccagatgtcgtcctagaaactgcatggaggcacaatatcatggattttgccatgccctatttcatccaggtcatgaaggagtacttgacaaaggtaatgactcttctaagtgtattcagaactagtttccttgcatgtaaaattctacatgcacattaatttttttaaatgcttttttctttagtagaagtaagtcatttagtcgatcataaaatattcctgttcttttgaaatttttttttaatagctgacaaatgacactgattggaaggggaactcaaatgtagctgtttaccctcagtgtatttatgagggtgaaaataatctatgtatttttttatttaaaaaactttgataaattttatttcaaaatagtatttttctcaaaatcagttcttgtgactcaaatattcatgactagtattgtagattcccttttatttggttggttcctgactttaatgatgtctatgcctgtttcccctggggaagctgcatgtatattcttaacatccttttaatcttcacaatttttttgatagtttaacccctgatttaaaaataccataggaggtgaacatgggaaaaaaaaaacaagctgggggtctaattgccttataacattcactattcgtcttagtgtccttttttgatgtatgaatttactcaccctatcttcagcagttactagctgtctctctgtagaacatttttaaatggttttagaggatccttttcgtcaaagcaaaaaacatgattaaaatcagagtctcacatctgattccttcagcctgcctgagttggggggatgggagggtgaagaagcgctaccaacaacccctcccatactgaatttttcctcaggataccatttaattagataccattgtgtctgtttaaagtttttaaagaattaacattttctgtattcaatgtaagagaaaaaacatgttgccttatcttagccatagatgagaatagcttcttaaacataatgccaacttgtgagacctgtctttaagctgctgttaacctaagtgctgtaaatttttctagtgattaagctgctttctttcatactgtagcataaattcttctgcattaagctttgaagttacacaaaattctaaattttgcttccagtatgccctttattttcacttctctcatacctttttagtggttagatgtttcttccctaaacctttgttgctgattctacctttttatgctcaatatggaattgattttttttctaagctgcaccttctgaattcctttgcaggttgatgcaataaaggaaaaggtgaaagttgattctttaacatctttaagtctggaggactaagtctaaggaatttgcatgatgtttttccttcctcttctacactgctgctgctgctttttccccccaataaattttcactaaagcctctgcaagtcccttgaaacataactttaatagagctgtaggacattagtagacgtttgctactaatcggctaataggctttaggaagggcaggaggctaatcagtagttggttcacagtctctcttaaatatattatgaaaaactgagtatggtgagtttccatattaatttcaaagtaacaggaaatttctcttccctgtcagggtatctggaccataataggactgtcataatccttgaagtaaattaaaacagcctctggttttactttgtgagcttgcctgacagttgtcgaatttatatatgtatatatacatgccctaaaaggctttttggggtttttttttttttgtattgaaggactgtgatccagtttctgatctcttgattcttactaattttttgctgaaagtagatacgagagatactagctgcttccgaagagactttcctcatgtttctccaggtgtccagttcttatggtgctagtccatttttaagaggaatcaaaacctttttaatcatgagagccaagcttgctataattgttgctaagcaacatgaattatttttaacaaagtattaacttctactttctgtaataaggcatacctctgaagctacctaaaatttgctctcctatttatcagttggcttgtccaaggatgtcaaattcaggcaccttttggttgctgcttccttcattggcttgtctccatcccaatataaatgaaacaaacttacgtctgttatcaaattgtggttagaaaagggtgggaaggtaaaggagagttgaaacaaatttaaaagaatttgggtgggggacaatgccttgggattatgttgaaccaaactggaatcaccactggaacttagggcaaacctgagtaaaatgcattgtgtgtgagacccttcagcagctagtaagcaaggcagttagaaagcgtgtgtgtgaaaaacaggtaattgaactgcagtgttatgcattgttttaaatgaagcatgtacaacagtcattgcaattacatcatactatttttgaaactcttatagcattgctgtgggctgtgtgtgtttcttgagagcctgtatagcaagtcatcttcagacctcacttcttgcttcagtacttttgcctttttttcatgcacacatacaccaaaataactgactgcatgttacttttcctctgcagcacattgcagtctttgtggaaaagccttttacattttagtgaattttcagtagtacagatggaactgaattcattgacatgcttacctgtaatttttctttttaaatccaaggatcagaaactttagttacagctcttaacaaaagcttgtgttcttaaaagacttctctgctttttttttgagcaatctaaattggatcagtggaaacaaaaattgaaagtccctgtgccagaggctgtcccattatatagaagaatcaaactttttgcttagcttgatgctattccttcagaattcttccccctacgcccaaacttcctatgtgtatgccagggcattgtgatattgccagctcttctaagtcttccatgtgtttctctaataggacttctgtgttcaacatctgattcagaccttaacttttaaacacatgttcacttcagattcttttccctggaagtccggaaatgtattatgcagtggtggctttttggttgtttcatttttcttcttttttcttagaagttactaatatacaggcatccatgtatttttctttataacttctgtagctctttcttgaatactggttagttagcaaaaccccatctgatccttgatggcacagagctgtgctttaagttctataactaataatttttgttctaagtgtggatgccaaaaaatggacatttcatatggtacttatactacataatagtctttaatttgatattagggtaatttgtaacacatcatttagactataaagtaggataatagtgtataaaagtaaactaatccatcttcctaggctagaaattaaaccacatttcatctgaaggagcctacttaggcttacttttctcaaactttcagttccctaacaaattaagatggattagactcatatttatggtatttaatatgaaacaattaaatataaaacagtgccctaaccttaatggcctatgtgaagactgaaagatacttttttaatagtttcaaacagaaatgaggtgctgccttaatctttttaggacctggtttttagaaacttttccactgaagtctacaatttttttttttgagtgatttttcataatttgcctttttgaagaacatgcagtgagcattcataaagtgtttccccctgcaccttggccccccgtctcatgcagcacatttatgacattgaaaaccaccagtaatagataacattgagatttgaaatttagttttacttaggtataatgacagaccaagtataaggctttggttgagagaccagcttttaaatattgaaagacaaatatagtgtaaaaggcgcaatggaatttgtatagtgaaggagattctctagtcccagggttgtaatgtcacttctgtctaattcattacagaattacagaatcaaatcatgttagccctagaagaaactgcagatcattttgttcaatcttctcattatataggaaaggaaatttgagggccagtgcaatggtttgccaaggtcacacaactagttagtggaaggatccaggcattctaattcctttctttcactaatacatttggcctgctctacagaattacttctgtctgatactatccactttgaagagtagctagcatatagtagccatttacttttggctcaattaaaagcaaacatttttgggacaaaatcaggctttcctgattacttcttagataacagagcccacacagtattaaaacatgcagcctttctttatgcaaaaagattgaatatggagccacttgaatcttaaacttcagtctgcagctataaccaatatcatcagaagttatacacaattggcaaaagaatagcttattctgcccaaatacttgtccagtcactaggatcatttcacttttttgaataccatttgctttggggagggaagtattgccagaccatgaattcattattacctctgatcagttttaaacttcatttgaaaagtggttccttctcgttttctccctccctcaggctgcatcctagcatgcccagttttagtctggcatgagcttttatggcattttgaatccctccttcctgagggtttataatgacagtgctgaaaaccacctggactgaagtatgaacattgccattgaatttgagggggactgagaatgttctttctagtctgttttattttgacagaatttaacatactaaggcttttccactttctgccataaacctaggtttataatacttttggggtgctaattaacatgatgtgtttttctccaggtggataaattagatgcttcagaatcactgagaaaagaagaagaacaagctacagagacacaacccattgtttatggtaatctctctctgtaacctcaaaaaattcattagacaaatatttaattacttagagactgtgcctcaaaatagaatacaacaagcttctaaagtgcaaaaggctttctaagaaatactgctctctactgtctgattttttttctgagaagtcataaagcaggtgttgatattattcactaaaataatcttaaatacaagaaaactcaaaaatagtcatttaaaatcataacatgaatctttcctatcatctggtccctcacgcattacctgctcataaattactgaaaaagaaatattgatgaattccattttcaaaagagcaaaaggtgagagaacatgccaaggctgtctttagtatgctttacataaagaatacatcctcattttaaattctaactggggcagagaactgggtagagtttccatttgagaactttccagagagataggatcttcaaactctcaagtgaatatttaagacaatttcatgtcttcttaaacctacatgtctgaattactgctcctttccatttcatagttggtgaacagattcatttgaacaatcactttgaagagtataggtagaagcacaataaccaggtgagggaacataaaaatatgaccattatggctgggtgcggtggctcatgcctgtaatcccagcactttggaaggctgaggcgggcggatcacaaggtcaggagcttgagaccatcctggctaacacagtgaatcgccgtgtctactaaaaatgcaaaagattagccgggcgtggtggcacatgcctgtagtcccagctacttgggaggctgaggcaggagaatcgcttgaacccgggaggcagaggttgcagtgagccgaggtcgtgccactgcagtccagcctgggtgacagagcaagactccgccttaaaaaaaaaatatatatatatatatacatatatatatatataaccattatatatcaggctactgacacaaataataatatatacacttattatggttttgtctcctttttactgtagataaaaagtactttaggaatttagaggacaggatagttttgataaagtgggttcttagagatgggagcaagatgtttgacatgtttgagataggaaacacatcaagtccttaaaggtgaaaaagacataggaaacacagtaggaacaaaaaaaagatgggtgtaatactttggggttacctactgaatttggcttgccttcagggtgttttcatgggtagttgaaaattgggttggaatttcaagtagatgtcatta[137 bp omitted]ggtgaaaccccatctctactaaaagtacaaaaattggctgggcatggtggcatgcaactgtagtcccagctacttgggaggctgaggcaggagaattgcttgaacctgggaggcaaaggctgcagtgagccaaaattgcaccactgcattccctgggcgacagagcgagactccgtctcaaaaaataataataaactggtttccaataataatttgtttgctgaagacagctttggttgttaaccacaaaaagcaaagacatgaagtcctttgtgtaggagaaatcttgatctaggtttacactgtagtgggatgttaaaaatacttttgtaggggtagagagaggtgttacttgttttcgctctctaagccaagttctctacaggtcatgttttctgtatatggccaacaactatttaaactttataagaaagagtgtcaacatagtatttgatagagggtgtatgttctaatgtatttcatacctaaagaatgtctgaatatgtctttttttttcccccaagatggggtctcgtctgtcacccaggctggagtgcagtggcgtgatctcggctcactgcaacctttgcctcctgggttcaagtgattctcctgcctc[137 bp omitted]gcctcccacggtgctgggattacaggcgtgagccaccgcgcccggcccaaatgtgtcttatttttaatttaactgctgtctctaaattagtactggatcttctataaatgaatttggtttcattgccatttagacatgtttaaatcagaaatttaaatgtaactctaaaagttatgttaaaaacatgtcatttagaccaagcatggtggctcacacctataatcccagcactttgggagggcaagatgggctgatcacttgtggccaggagttcaataccagcctggccaacgtggcaaaaccctgtctctactaaaaatacaaaaattagctggacatggtggcgcacacccataatcccagctactcgggaggctgaggcacgagaatcacttgaacccaggaggcagaggtttcagtgagccgagattacacaactgcactccagcctaggcaacagagccagattcttttttttttttttttttttaaaaagtcttttaaaaaattcttttattgtgctgattttattgtgtcatgaagtgtaatatgcatgtaggtatgtgtcaagtatacagagtgtcaggcatacggtgttcagtcataagcagttctggcctttggccctgcactgtttgttggctttttaggtaggaaccttcttagagtaagactgtcatgctaaaattgtagcaatcaaatgtgccccccatacaactcatttgaggttgagattatgttgctagagtggaggagattggagtgttctaaatgctaacagtttgtcctgcctccttgcccctgccccctgctcctttttgttttcttctactgtaggtcagccccagttgatgctgacagcaggacccagtgttgccgtccctccccaggcaccttttggttatggttataccgcaccaccgtatggacagccacagcctggctttgggtacagcatgtgagatgaagcgctgatcctgtagtcacctattttcgtactgaaacatcgtctttacccacttctcagtttataatgggggaaaacaggcaacgtgttcttgtaacctttatttcatgaaggacttctttttgtttctaactataaacttggatcacctatgttaaaaccttatttcacattccacatcattttagaatttattttcgaaggggaatagtttcaatgttttattcacttgggctttttttcttccccctctttctttaaagaactgctcaatattcaatctgttgtgaagaacctgatttgcactctgtagtgtttaaagaaacaaagaaactctaatattgaatctcttaaatttagtgtatgtaaacagcttacaaatacgtattgtctaaatgcatttaaatctgttttattcaaagaaaagctaaagcaaaaacactggcatatgaccatgcaagactgtcagtgccaacaaagacaacactaatcagcacatcgtacactggattgcagtgcttcccagattattgaaaaatgttacagacaacttgcctgatttttaaatgagcgtaaaaggccctctaacctatgcaggtttccccattatgcatatagaaaatgctagtatgttttgctcacttcatatgtaacaggtgcccttatgttgtgctgtatcctgtgctttttctgtgggaccattccattcaggagcaaagagcaccatgattccaatcttgtgtgtgtttactaacccttccctgaggtttgtgtatgttggatattgtggtgttttagatcactgagtgtacagaagagagaaattcaaacaaaatattgctgttcttcagttttgtttgtggaatttgaaattactcaaatttaaaataaattactggactgtggaaataacatagaattgaagttttaattaaataccactcaaacgaaaagaacagtagtttttgtagttttatattggatactgaggcattagggaggcatgaaaggaagaggaatgaggattgagacatgtgaagacattgtgcattatatcaatgtgcattcctgtagttcattaacaaggtacatgcaatagtctaaagaaccagagtcactactatagtggcttaacatttaatctgtctccaatattttaaccaagtgacaccgaggtttttatcgaagcatttcacttaaatgaacaaatcatggctgttatattaacttgaaataaaatatatttaaacatgtagttaacatgctctttctcatcatgaattataaaggtgcccaaattatgggtatcttgatttttttcaaaaattggttgtgtgaatccagctcttgcttatggctgagaatgttcctaaagttcatttcactatcccttaatcctcaatagctacacatacccccttgcctagttagtcttgcactgctttacaactctcttaggcaaattacctaacataagctccacagaagagttttttaaaacttaaaatccctgtcccaccaggtgtggtggctcatgcctgtaatcccagcactttgggaggctgaggcaggcggattgcttgaggccaggagttcgagacaagcctgaccaacatggtgactccatctctactaaaaataaaaaatcagccaggtgtgatggtggatgcctataagatcctagctgctactcaggaggcaggaggctgaggcatgagaatcacttgaacctgtgaggcaaaggttgtagtgagccaagatcacgtcactgcactccatcctgggtgacagaatgagactcttgtctcaaaaaacaaaaaaacctatttagtttcatccaggacattaagtgaaagtgtttaatgtgagtgcaggtcagtgaagaatacaatggtgcccctgctttgatttgtgggaggtgccatcagttttccccaccactgcttttgcaccctcagtgcaaatatcaacacagagaaaaaaaaaataataatagtattatgaaaacattgactctgtggagaccctgtgggttctgcagagtatactttgaaaactataagattatgagttctataaaataccaagtacagatgaactagaaaacaagcatatatccacaattaccagaattttcatagtattccttttagtagatatgccatgacagttacttagccaccccatgccatcctgttgggaatgccactacctttgaatttggagccatcagtctatctgaggcaaacctcagaaattacctgagccagaatcatgcacttagcactgagttcaactcagtcttaacgttgcattttgttgcatcacttttgcagccagtaaacattctgtttagaaatagttgctattgtggcatcattcacagttgcaatttttctcctgtgctgtcatatgcctgtgcgaagtgtattaaatgaatcaaatattagaaatttcaaggctgtctttagtgttctgcccacaatactccaccaatgaccttagaccttgagatggtgctataacgctgcttatattgcagttaaccatagagaggtggagccacttaaaatgggcctattaccaaaattctccctggcatcattacagttcttggggatacactgattttagaaattactgtcagtatcctcctaaaagaaggcttaaatagtttctaacaagatgactatcaggaagctatgtggcttggggagttgggaccctctgcctcatattctgggtaactggtataacatagtaattattaggattgtatcaagtgtatctaaagatcaaaagggaaaaaaggcacccttaattgtcaaagttagttctaggaaaaaatactagcagggatgacaaactacgttcactttacagttaccataaattcttacttgggcccacccatttccatctgttaaggtccataaggttactcaagtttcagtggcttcattgttacaagaaaggggggaagtgagaaactttaataggctgtgatttagaaccactgctgattaacctttggccagtatgggtcagggaaggtgaacatgaaacactgcacagtaggttgtatcaatgctataaaactcaacctggagacaaaatttaaacaggttataaaccatgggactccattgagggtggctgtatcagtcacccaaaaagtgacagcaggggaacaaactgcagcttgcctctagtgggaatacccttgaacctcgacctccagggggacagcagcatagtcttggggaagggctaccaacacaaagggacctaaccatgtatagggaaatgctgtttcctccattttaatccaattgtatcatgacctgtttctctcatcttaaatatctgtttcagcctctcacttgaaccaccaagaccatttaaccaacagtactgtttttaagcccaagatgacaactgccaaccatagaacatgggaataggttttattttcatctcaagaacatttaagttgggtgaagaaattcagcttttgttgttagaatctgacaggcttcaaacacttgtgatggaggggttgttgtcatatcaaagtccacctagtaaagttttaggtgaccagtgactttgtcaattaggtctgctggtcctggcccaatccctaggacagtttgagagcctggtgcaatctgagtacgtccagcatcttgaattaaacttacagtcagtcccagcatttttgcatgggccaataatgcaatcagggtttcttcatcaggagctttgaccaccaccttgggctggccacagtattcccattgtttgagcatttcaggatttcttctttgaatctgcttgtaggctgaaacagcagcatgagagcactgggcagccactttcccttttcccatctttaagtcatttcgaaccacaagaatcatcttgtactccccgctgtctcccaagatgcttgcttcactttcagtatctgtgtgtgtcttgctcgtcttgcttttggggagcatcccaaagcatactcgaaggctccagcccaggcacatgccacaagcaactccaacagccaagccgagtgtactgggatgagccaaatattccataaccaaggatttggagggcatcttaaaggaaaggaaaacagttatcactatccggcagtaacaacttacagaggtataggcttatcagagaaacattttgactatacacttaatggtcatccagaaaaaaggcaaaacacacctttgatcttatgcctgcaccctgtttccaacaccctcttgcccaccaccagtgtactagaaaagattcaagcatccacatgaaacagtttaggtcattttgaatcttgatgtaaacgaagttgcataaagttcaaaaactctattcctcagtcttcccttagtcttgtggagatgttccgttttaccaagatgcctaagatttaaagaaaccaaaaataaccctttcctggaatacagtgctaatcggtgttttcacaatgcagtggttctcagtggagatggtatcaaatcagttaccctcagaagaacctcactgtcacattaatgggcctggagtgaggtgcactactgaaatttactaagcctgagcaaggatgctaaaaaccttacaaaatgaagagttgtcccattggacgtgagtgcagctgaaaaacttaataactgagatgagaactcaacatcattttacttaagaacacaaaatattttttgcatagttttactatgtacaggtgctcctcaattttccatggggttatatcccaattaacccaattaattgaaaatactgtaagccaaaaatgcatttaatacacctacagaatatcatgacttagcctagcctaccttaaatgtgctcagaacacttacattagcctacagttggacaaaaatcatctaacacgaggctcttttataatagtgttgaatatctcctgtaatttattgaatactgtaagtggaaaacaatggttgtatgggtactcaccattaatttacacagctgaaagcacagtggtcctgaaaaatgtttgaagcactgaaatagaattaattgctggatgatggggatgcaacagggtcctcaatttctctctcttctgatgaacatcgagaataggtggtagaaggcattgggacatcaacactagttgatggtttagcaagcatagtgttgttcttcaggaagataccaagttttgaccgtacagcttgtttcttcttttcactatatatttctctgtagcaagcaagagcatcctgtatctgcgcctgtcaactgtggcgaatctctcgtaattgacgtccatttcttctaacgtgtaggccactgctgatagcagcaaatgcctctgccagtttctttgctgtgaactttctaggtgccgtgggtgtaacttcttccactgcctcaacgcctttacctctttcttcctccagtgcaatcagctccttattgcaaagatctttagccataattatcctatgcagctgttccttaaaagctatggcaccttcattaccagcacgtgctgcctcaccagtgatctttacattgtgaaaattatgacgccttttgaagcgctggaaccatccatgacttgctttaaacatttgtgtatatgtaggatcactggcacggtcttttagcatattaaaaagacttcttgccttagcctggatcatcagtaggctaagtggtatacgcttctgtatctggtcttccatccacataacaagtaatttttccatatcatcaattggtccagcccttttctttgtgatgacagtggatttaactgatgctgacgatttcgctgcatcactgatttgcttcttatcccttaagatggttgaaatcgtggattgccaaagtcctaactcacgtgcaatggccattactggcttgccaccttcatgctgggcaattatcttgagtttcatttcaagagtaattgccttcctcttcttcatctcaccagaaacaggagacactgatggacattttgtagacatgatggaatgtgaaaacacaaaacacaatatccaaaaaagctgacaacacagtacacggtagaggatgggttgttgattcccgtgatcacatgggtgactgggagctgtggctcgctgccgctgcccagcatcacaagagtgtactgtaccacattatcactaggccaggaaaagatcaaaatgcaaaactcgaagtacagtttctactgaatgggtgtctctttcacaccatcctaaagttgaaaaatcctaagtcggagactgtccatactgaattttccagaagtgtagctatcataaaacaaaggaatgtcatcctttattattttagaaaatcttgctacttcggcaaagctgttcataatatttgagtcaccaataagacacttatatcagtctacaaatgaggctgctggattcacagtgcttctatgtggcaagcaactatcagtttctttttctagtggagtattatctaagcatttataaacatggggccactatatttgtaatgcactgtatttgtaatgtaaagtggtgcccttggaattgtgcactgcatgattggcacggcatagatgacagccctggaagtacttataaatttcctttatgttcttctttaaagttagggcattatattaacattctttccactaattttaacataaaaggggttactgtctttggtggggcagaaattcgtttgaggtggggtcaagagatagagcaaaaagaaaaagcaatggatataaggcgacacagaggaaagcaattttttttttctcctaagaagaaaggataagcatatttaaatgttaataggatgaagccagaagaaaggcaggtaaatgctcaagatagagaaagactttataaagggatgtggttttggaaaggaaaagggacacctttcccaatttcagttttaaatcaagtaggtccacggatttgaaggcaggaaagtattccccctgagggaaggagctcagacagaagttaaaatggagtagagaagagaaaggcggaaataaaaggtgtggcaaaatatggcaggattgcagaggaatattgaaagcatggttaagattaatgatgactttttaatggcaacatactatttgtgattttctccagtagtacttagaagccaaaagactaaaactactaatcacttcctccagacatacaaactaacctccatccacactcatcctttgctctcccctcctactgaaatggtagttggatgtatccaagtttaaattatgccaggagcacgccccaagacacagtggtacaagggaatttaggataagggtaagaatgtttgacatgatagaccatgcaacctgtgttattacatttttctcttttggcctacctgataaaaagcaacctgtattatcaaagactgatttatggacaataaagtgatgcatgctatttatctagacatgctgttgaagaacaggtgtaatgaaagtaaactggaaagacttagagcgatgcatagggttttgattttggagacgaacaattacaaagaacatagctataggaatgggtatctgaaatagaagtgtgactactttctactttttcaattcttttagttttatgatatactgcttcccttccacaaatactgattgaccctgttctagaatctaagggatacaggagtgcacaaagcagaaaaagtcctttctctaatgaagcttacattttagcaatggttttgaaatggtccaatcctaattttgaatttctttcatgctgttttaaaactttggggtttttttgtttgtttgtttgtctatttgagatggagtctcgctctgtcgcccaggctagcatgcagtggcgcgatctcagctcactgccagctccgcctcccgggttcatgccattctcctgcctcagcctccctacaggcacccaccatcacacccggctaattttttttttttttttttgtatttttagtagagacagggttt[131 bp omitted]cacaatactttgacatgtattgttatttgatccactgagaagtgaggattactgccatatcaaaaatgaagaaattcagaccaagagaagttaagttcaataaaacaaatgtttactggctatctatgtgccagccatacaccctgttaagctgaggatatagtgatgaatatgggccactgtcagctgttcatagataagtagtgaagacaaataattgcaagactggtaaatgttataaaaaggtgtttgacagtcccatcgggggtgagatgggaggcagtaacagatcatcagacattagattctcataagaagtacacaacacagatccctcgcatgggcagttcataacagggttcacactcgcatgagaatctaatgctgtcgctaattagacggagctcaggaggtaatgttagcgatggggagtggctgcaaatacagataaaacttcactcagttgcccaccactcacctcctgctgtgcggcccagttcctaacaggccacagggacgcctgttctaaaagatacctgagccttgactagcagttggcaatagatacagggagatcatttcagaggctgctataatgtagtaatagttaacatttatgaagtgttctgctacacactggctaaacactctataggaattgtcttctttaatgtgcctaacagcacttcaaggtaaatagagctggtcatggacttactgtagtttcgcttaagctttttggctttacaatggttcaaaagcaacacatattcagtagaaactttacccatacaaacattctgtttttcaccttcagtacagtattcaacgaattacatgagatattcaacacttgtaggccttatgttagatgattttgccctattgtacgctaataaattaagtgttctgagcacctttaaggtaggctaggctaaactaccatgtttggtaggttaggtgtattaaatttatttccaacttctatttccttttctaagagacagggtttcactcttttgtccaggctggaatacagtggagtgatcatagctcactgcagcctcgaactcctgagctcaagcaatcctcccacttcaacctccccagtagctgggactacaagcacataccaccacacactgctaatttaaaaaaaaacttttttttttaagacacaggggtttcattatgttgcccaggctggtctcgaactctgggcctcatatgatccctcccacctcagcctcccatgtagctacatttacaggcatgagccactgtgcctggctctcaatttatggtactttcaatttatgatgggtttatcaggatataaccccaccctaagttgagaagcatctatatataattatgatccccatttttcggatgtagaaaaatgaggtacacaagttatagcttgcctaaattcacccagctcataagtggtcgtcttaatccagagcccttgttcttttttctttttgagacagagtcttgttcttgtctcccatgctggagtgcaatggcacaatctcggctcactgcaacctctgcctcctgggttcaagtgattctcctgcctcagc[132 bp omitted]cggcctcccaaagtgctgggattacgggcgtgagccaccatgccctgccgagcccttgttcttttttttggagacggagtctcactctattgccaggctggagtgcagtggtgcaatcttggttcactgcaacctccacctctggggttcaagtgcttctcctgcctcagcctcccaagtaggtgggacttcaggcatgtgctaccacacccggctaatttttgtatttttagtagagatggggtttcaccatgttggccaggctagtctcgagctcctgacctcaggtgatccacccacctcgacctcccaaagtgctgggattgcaggcgtgagccaccatgccctgccgagcccttgttcttaacattactatatcaggcctctcccagcagtctagatgagatgatggtcatttagacaacagtagtgggaatgagaaataaaaaaagtgtctaaggtacacctgtctgatttagtgactgacaggaagtctggtggcaaaagaaagggagaagttaataatgacagctagatttgaacaaatggagaattttggtgaaataccaggtttgaatggaaaagataatgaattagttttgttctgaacaaaagacatctcagagatatctagaaagaagaaaaaaaaggatatatcagcttaaaggacagaaaggtctaggatatatcagtttaaagtcagaaaggtctgggctggaaatatagatttgagagaccttaccatataattgaagttactgaagagatggaagagtatgaggccacttggacaaatatgtagaatgaagaaaggactaaaacataatcctgaggaaatgaacattaggaatcaaaggagactgacatggagtggccaggagtaggagggtcacatagggtaagctgtagtgcacctagtttcagtgctcttccactcaagtgcctaaatacggtgacagggctgcacagacatagtatttatggttctagtgcctttacagcccccaccccctaaaagagacaaagacagagaattcttttttttttcttaagacggcatctcactttgtcacccaggctggagtgcagtggcgccatctcagctcactgcaacctctgcctccgggttcaagcaattctcccgcctc[134 bp omitted]cagcctcccaaagtgctgggatacaggcatgggccaccatgcctggccaagtttctatttgatgcttacatatcagcaggacttttctttgataatctaacaaccagactccaaactgaacaaatatgcaatgtcagcaattaggattctctgaaataatttctaggctgcaaagtaaccaaatatcccatacactacattccggtactatctggagaaggaactgctctacatagagaagctattatgtgctggataacatactaaatcctttatatccattacctcatttattgttgctatgaacacataaaaaggaagatatattagcctcattttaaagatgagaaatatgaggatcaaacagagaagttgcctttttctttatttttttttaaagagaaggggtctccctctgtcacccaggctagagttcagtggcatgatcatagctcgctacagcctcaaactcctgggcttaagcaattctcctacctcagccttccaagtagatgggactacaggtgcatgccaccacaccctcctgattttttaaaaattttttatttttgtatggacttggtcttgctatgttgcccaggctggtctggaactcctggcctcaaggagttgcttgaggtcgaggcagcagcatctcgagtccagttcaaaaccaatctgggcaacccagtgagacctcatctttacaaaaaatttaaataattagccagatgtggtgccacatgcccatactcccagctactcaggggataaggtaggaggacacctcaggctgggaggtggaaattgcagtgagccatgatcgtgccactgcaccccaggctggacaacaatgcaaaaccctgtctccaaaaaaaaaaaaaaacccaataagatcaaaaacaggacagtgaaagttccaaaagttaccaagtttatttattatgtcccatatctcaatggagtgtctaatcataaaaatgctaaaattaacacatatttttgttctttaggatgttctaatctcatattaatctgatcagattatcatctaactcctctaaaacaacatgtctgtctctttttctgtacacttacgacaagcgtatcaataagcctagtgcctaagactaaggtaaaacaaataaccattctttgtctcataaataattctgggcaatgacagcagaacaaaataagtacatcctataaaatcttcttcttggtgccttctaattcccctgcctcagtaaacccatttcagtagtgctcttgatcccattacctccttctgcaccatgctccacccgttaatctttttttaagagacagggtctcactatgtggccccctatgtggcccaggctgttctcaaactcctgggctcaagcaatcctcctgtctcagcctcccaaagtgttggattacaggctgagccaccgcgccgggtctgcagtttacaaccgaaaaaaacaaacaaacctttcccaaatcttctctgacccttaagccactgccccactttccctgtataacatattcccagagtctagtatggtgcctggggtatgtcagtaaggattaatacctctctagttaatctctttgtgtgaaaaaggggggaaattttttctttcttttttttttttttctgagacgaagtctcactctgtcgcccaggctggagagcaatggagcgatatcggctcactgcaacctccgcctcccgagttcaagtcattctcctgcctcagcctcccgagtagctgggattacaggcacgcgccaccacgccggctaatttttgtatttttagtatagatgggttttcgccatgttggccaggatggtctcgaacttctgacctcaggtgatccgcccacatcagcctcccaaagtgctgggattacaggcgtcagccaccgcgcccggccccaaattttcgactatattcttagaaaccaattctttccacgcagagctcgacagctcgaaacgctggggatattcataagtgcccagctgagggtatgaggcctgctcgctattttatcaatttcggagagagcgcatcgatactgcctgcctggaggctttgctgggaactagaaattctgagtcttcccctccccagcagcctgttcctttcctccaaaggacggttcgcagaacaggaacagagggctcagcggcccctgggcggaagacagtttataaaggagaaaatgaagaaggtgggtaatgcaacgaggtgaaaagaaacgttcctactggcgagaaaatgaataatgatattggtctccttcgccctgtaaggagccaaccaacctacctacagtacctcctttcctcactcgcgccttcccttcttctgggcagcgaacacgtttctatcgcgtgagctacctcttccggggttcctgggtgacaagttccggatcaagaatcacaaagcgagcagtcattcttcctcttgccacacccacagggcccgcactaagagcctaactgaaatcccgcgaggatcaaccgagctcgccgaaaggagggaggaacgtatcccttctggaggctgtctcagggggcagagggaccggaccggaagtgacgtgagcgggttccggttgtctggagcccagcggcgggtgtgagagtccgtaaggagcagcttccaggatcctgagatccggagcagccggggtcggagcgggtaggtaaactaactcagggaattggggaccgaagcctgaggctgtcctcagagcttggcgtcttccggagctctcccacttaggcattgcggatctggggcactgtgattccgacttccagcagtgttttaggacgctgctgactggatgtctcaccctggatgtctcacgctggcggtagccaggttatttgggacaccttctcatggttggtcacccggacattgaacccagacaccgggctgttcgttctcctctccgcgtacttggaagccttgctaggcttctttagagaacctcttagtcccgggatgtccaggaccttggagtaagtggagaaggtcttccctgctgatgactgagctatttctcaggatctgtcagtttggtttttgctctcccgaacctctggcgcatgatgctagatgtattcgctcctaaacgaaatccaggcgtgcaagtgccatctaaagctctggtggtacagggtagccaagggaatgggccttcgctccgcagagcccttggagaggaacttctcagatttttcactgctttaatgaaaaagagttgtctgcctttccaaacccctgaaccccgacctctatatcttattacagtggaggtatttgcagtaaaacgtgaaggtcgacttaatctctaaaattccagaaaccatatgtggccctgtgtcacactgctagattacttatgacctccagaagattttacacaatcatcttttatttacctgcaactccatgtaaaaatctaataatacacgtagactggccactgttgatgtgttttggcagcatcgctccttatcctaatgttaacgtctttcatttctactttggggcttgtcagagatttttgtggacagattacattgatcatttgaagaagcttgtacaagtgtttctggtgttgtcatgatagaatttaatattccagttgctactacctagtaattgtattgtcattagctctgattttagttgtgtattcttagcatagatgatgaaaggaagaaacttacttactaggcatcattgtatgcattgtagcttatgtttttactgtggaagagggatggtggtacctagacaaatgtgactgatttgtgtaggtatgaagtgactctctcgagtagaaattttatattttactactttgcctacattatcttaaggcactgaaggttacttttttcctttgagggatatatcctacttgattacaattgattaatacagtttaatttctatgagtcacattccagaagaaaatatacatagaaccatgatgccttttaccagtttacctatagctagttaaatcagtttgtcagtttacatatttttcttattttgagtttgaaaatttgttcacgcttggctttgaaacaaggtgacaaaatttgagatatggaattatgatagatgtatcattagtttaacattcggtaaatttgcttcttgattatataactgccaaatctgatcttatcttctttatgttcaattgaaggactgattatccagtttttctcacttttccaacttctcgcttttggcttgaatcaccactttttaggattttggtaactattaaactttaaatcagaagacctggattgaagtctgggctccaacacttgttaagtaatggctgataggttacctaacattctgagctggtctagattgtgttgataaaaattctgctcactttctttcatacaactgtcacaaagattaaatgagctagtaaacatgaaattattaaatatgaaaatatggtatcactttactcttagaactggagatatgtcagtgtagaatactgttactttgcatcattatctgaaaatattatcacatacttttctgagatgatctttgccccacctttgaaagttagcaaagaatagtttgataccgtgatccattgaattagtcaccatggttaataaataggttcctggaaaatgagtatagttttgcattcgggagtttaaatctgatcctttttggtcgtcatgtattgtcacttcagaacttccaagtgcagaaaaagctgaagttttttgcctacgtatagttaactaaagagtagaagtagtcctatcttacttacattaaataagaaaccttattattgggccgggcgcggtggttcacgcttgtaatcccagcactttgggaggccgagttgggcggatcacgaggtcaggcgatcgagacaatcctggctaatacagtgaaaccctgtctctactaaaaatacaaaaaattagccgggcgtggtggcaggcgcctgtaatcccagctactccggaggctgaggcaggagaatggcgcgaacccaggaggcggagcttgcagtgagccgagattgcgccactgcactccagcctgggagacagagccagactccgtctcaaaaaaaaaagaaacattattatttcactgaaaccaatatttagaattagaaggaatctctgtgaatgtataagtagattcccatttaacagaggagaaaattaaggctcagaaacaatcagtaattagtaattggcttgcttgaggtcatctggcttaggtagtgctagaacctgaactgtaaggtctcaagtgttctttctgttctaacaaggttgtatccaggcatcttattatggtttggtaatatttccaagttcacatgaaaataattactcttaggtattaaagggatctatccacatacacacgtaaatacacacatacgcacataagccttatttacaaactttttttccctctttagctagtttagtcttataaattgtagcataacaaaaactgtgcttggctagatttgaagtgtaatagattaaggaaagaaaatcagttatattcttcagaatagtttgtctgagttcatgcttcatgactgtcatgtgttgagttatctttctggcaagtggaaatgacggaggagccttaacacgtg[145 bp omitted]acccggtgtctacaaaaaatacaaaaaaattagctgggtgtggtggcagacgcctgtaatcccagctactcaggaggctgaggcatgagaatcgtttgaacccgggaggcggaggttgcagtgagccgagatcgcgccactgcactccagcctggacaacagagcgagactccatctcaaaaaaaaaagagaagaaaataaaagaaaagcagtaggagagaactgtattatttgctcttacaaaaaaaaaaacctccccaagctgtttgtaattttaatattttgttatgttaattatctattatatatagagccatttctctagttattttattctgggtaaatagccattgtagaagagttaattctttgcattgttgggtactctttttttttggttccattgatttaacaaactttttagtctctttagtctttctcggagatgatagttctaggtgctactgtcattcctgtttttgcccaagtgcccttgctgtgtctcccattttggtgtggaaatgaactctagattagagaatcctaataaacaggacaaattgaagtgataactttgtcgtggttttgtaaattgttactctgctttcacaaagccttgcaaatattttgaggaatagtaaattgctaagagcatattgcctcaagaaattccttattttatatgggaaagcagctttggatggagtttgctgaactgaagttaggtattatgtaggcccttatataaagcttattttaaaatatgctccttgatttgcagcatcaaggaaatttgaacaggagataattttctgtgtcagataaaaggtgatacttaaagtttaaggcatatttaaattaagcaagggcaatctattgagtaattatatcacagctaatatacctataattgctcaagagtttgtttgtattcttgaactacttaatcttttcagtagttcatgggagtattttctcttgtccttgagttttttaatgataactttgttctttatagattacctggaaggactaggcaggtagtgttaaaagccagggctataaagctagactgctttttttcaaattctagctctattactatgcaactcttggattagttactttttacttcttgctatctcagtttcctcctggacaatgaagtcaatacccttcttgttaggattgaatgaataggtttaaataaagcatttagaacagtgtctgtagcatatagttaaccatgattgtgatcattatcatcatgtggccccctaagctattgccaagaactctttcccagccctcttttaaaagcatagctttatgttgctgcttacttaattattgtttgctcattattaatgaagttccagtaaataaatatctgagtatacacttcactttgtctatattttacaacatatgtgagattcttaaccaaatgaggcattcttttgggccattctgttaactttttggtattaacagactacattatctgtgtaagccataacacagaatttggcaattgaaacttttgatgtttcatgatgtcttttagcactttcttggaatggaaagatcattttccagtgacatctattgccttatctgttcattatccagtcagtgaacaaacattttgtgtcccaggccttacaccaggttctggggaaaacaatgggaaataagaattgttaggaaggcagcacatgagggtctaagagagagttaacaatgtggatatatgcttatttgaggctggagcataatagacttggaatacattgacatgagatgatataggaaatatatacaggatccaggtcatgcagaattttgcaggccaagggaatgagtttgaatttgattttgagtgcagtaggaaatcattctacaattttaagtagaggagtaataggatttataagaagttcattgttgttcatgtgtgaaggatgaattgaagcgggcaagaacagaaatggagagagaagttgagagtccactgcatagtccaagaagaagatgaagatggtctggactagaagggtagcaaagaagatggacagttgtgtgtggataccaaatatatttggtataggacttggtcctgggttagatgagtggtaagaaaaagggaagtgtcagggatgactaagcttctggatttagtgactgggtgggtggttgtgccaggtactgggagaagggaggtttggagaagaccaggtttgtttgttacaagaaggtgggtaggtgtagggagaaaaggacatgttaattttgagacacttaaagaatcatctatggacacaggaggggggacatcacacaccggggcctgttgtgggttgggggaaggagggagggatagcattaggagatatacctaatgtaaatgacgagttaataggtgcagcacaccaacatggcacatgtatacatatgtaacaaacctgcacattgtgcacatgtaccctagaacttaaagtataataataataataataataaatcatccaagtcacgcacttacatatataaatctagaggtcaaaaccagaaatacaaatacgggatagtattttcaaccatggaccagatgagtcacctggggagatagggagaggagagggccaagggcaggtaaaagaaagatctgggctggatgcagtggctcactcctgtaatcccagaactttgggaggctgaggtgggtggatcgcttgagtccaggagttcgagaccagcctggacaacatggcaaaaccccatctctctttttttttttttttttttgttaaaaaaaagagagacttttttttttaacaaaacggagactaagaaggtatcttagggctgggcacaatggttcacacctgtaatcccaacactgagaggccaaggtgcgcagatcacttgaggtcaagagttcaagatcagcctggccaacatggtgagaccccatctctactaaaaatacaaaaattagctgggcgtggtggtgggcacctgtaatccccactgctagggaggctgaggcattagaatcgcttgaacccgggaggcagaggttgcagtgagccaagatcgtgccactgcactccaacctgcgcaactgagcgagactccgtcttaaaaggaaaaaaaaaaaaaaaaaaaaagaaggtttcttagtccgttttctgttgcttataccagaatacccgaaactgggtaatttataaagaaaaggaatttaatttttatagccgtggaagctgaaaagttcaagatcgagtggccacattgggtaagggccttcttgctggagggactctgcagagtgccgagagtatcacatggagggggagctgagtgtgcaagctcagttctctttttctctgcttataaagcaaccagtcctacccccatgataacccattaatccattaacccattaatttatgaatggattaattcattcataagggcagagcctccgtgacccaatcacctcttaaaggccttgtctcactctactgccacattaggggttaaattttaacatgagttttggaggggacacatactcaaacaataataggagtgtttgaaagaagaaaggtcagatacacaaaactaataaaagtggttacatctagcagggagagtggggagcaaggtttttcacctttttcaaatgtatatatataattattttaaagcacatgaaagttgttcttgcgtttttgtttttgtttttggtggggggtgggggcggtgcagggagagggctttgagccaggatctctgtcacccaggctagattgttagattgcagtggcacgatcacagctctctgcaaccttgacctcctaggctcaagcaatcctcccacctcagccccctgagtacctgggaccacagataccatgaggtgcatgccaccacacaggagtaattttttaatttttttggtagggatggggtcttgttatgttgcccaggctggtcttgaactctggcactcaagtgatcctctcaccttggcatcccaatgtgctgggattacaagcatgaaccgctgtgcctggcctatttctgtattctctattcttttccattggcttctaactatccttttaccaatatcacactgtcatgattactgtagatttatagtaattgttgacatcagttagtgcaagtccttcaactttgttctttatcccaattgttttcgctactctaagtttttgcatttctataaatatttgaattgctttttttataaagcttgcttgaatttgattgatcttcattaaggctatacatcactttgagggatttattagtgtgttttcacactgctataaaggtactacctgagactgggtaatttataaaggagagaggtttaattgactcacagttctgtatggctgagaaggcctcaggaaacttacaatcatggtggtaggggaaacaggaaccttcttcacaaggcagcagaagagaaaatagtgtgaaggaggaattgtcaaacacataaccatcagatctcgtgagaactcactcactatcatgagaacagcatgggggaaacggcccccatgatccaatcacctccctccctcaacatgtggggattacaggaccctccctggacacatcgggattacagtttaggtggggacacagagccaaaccgtttcaggggaaattgacatagtaacaatatcaagtcttccaaacaatcaacaaaacatgctaatcatttatttaggctctgtataatttattttctttctttatttcgttttagattttgcttatattttgttaaatttgtctctaaatattttatattttcagatgttactgaatctgaaattttaaaaaattattccaagtatgtaatagtccaatttttattccaagtatatggtggaaagtattagttttgatcttttatcctgtgaccttgctaaattcactttgttctagtagttctgagcatttaaaatttttcttttattttggcctgtgttatttaggactgtgtgcattaacttctaactacctagaaaattttttattttttttttgtactaaaggttgacataatttctggcttatcagagattgtcatttataatgcccattcttagcaattttttgagacttgtttcttagcttattcataagtgtggctcatgaaaaagttcagtatccctacagtggtgttgctttagagtagaaagaatagaggatataaatgtcagagcaagtgttcacccagacttttccaagtccaaattcggtagttcttctactttagtgtacacaacagtccagtgagagtattttcaccccagttatacaagtgcaaatgccccaggtatttagggacagtaaagtagggagtttcagatagtttcatagatactacgtgagtttcgtagatactttaagtactaagaatcaatagggatgagtgttctgttaattctagtaatggggaacatttgaaaatactaggacaagctaaacttctgggactgttttttcatcttgtgtgtatatgtgactctggaattcctcagtgaccactgaaaatcctctcactggactgttttgtatagtagaagaactattgaatttggacttggaaaagcgaggttgaactcctgctttgacatttatatgctgccgacttgctatttggggcccttggagcactcagtttctcatttgctaaaagcaaggataaaaataacagtcccttacagatggctgttagcattatgtttgttaacctatttttaaactataaatcactatacaaaagtagttgttattacatacatccaaaactctacccttgtgctagttggaatttttttttacaactagaaaggaaattattgcactcatttactccatgtgactaataactgaatgaggaaaaagagaatcaggcatgtgaagtgacaatgccaaggtctcactcttagccaaatctcccaactctagtctggtattccttcattatcttaattcttgaccttactcttagtcctccaatttttatttttttttatttttttttgagacggggtctcgctctgtcgcccaggctggagtacagcgttgcgatctcggcttattgcaagctccgcctcccgggttcacgccattctccttcttcaacctcccgagtagctgggactactggcgcccaccaccacgcccggctaatttttcatagacacggagtttcactgtgttggccaggatggtcttgatctcctgacctcgtgatccgcccgcttcggcctcccaaagtgctgggattacaggcatgagccaccgcgctcggccggtccgccatctttttgatgaaaatgttttgctaagattgcattggttatgaaaaactgcaggaacatttagaagtagattaagagaaaatgagaaatgggatttttctttttctaatctctttttttttggagacacactcttgctctgtcacccaggcaggagtgcagtggcactgtctaggcccactgcaacctccacctcccaggctcaagcgattcttgtgcctcagcctcccaaggagctgggactacaggcctgcaccaccactcccagctaactttcgtatttttggtacagacagggttccacagtgttggccagtctggtctggaactcctggcctcaaacgatcctcctacctcccacctctggtacagtggctcatgcctgtaatcccagcactttgggaggccaaggcaggaggatcacctgaggtaaggcatttgataacagcctgaccaacatggagaaaccttgtctccactaaaaacacaaaaattagctaggcatggtggtgcgtgcctgttatcccaactactccagaggctgaaacaggagaattacttgaacctgggaggtggagtttgcagtaagccgagatgacaccactacactccagcctggatgacagagcagagcaagactttgttttaaaaagaaaaaaaaaaatcagacccagggcagtttataatttttcaacaattagaaacctgtgatgagttgagtgtattttatacatcactagatttaagttgaggaactttttaggccagaaataccctctttacctgctgatccattattgggagattaatggagattctgaatgtttttaaattgcatcctaatttggggttttgtctaattccccaagactgactgactgacttcctttcttccttccctccctccttttttttttttttttttttttttttttgtgagacggagtctcgctctgtcacccaggctggagtgcagtggcacaatctcagctcactgcaacctctgccttctgggttcacgccattctcctgcctcagcctcccaagtagctgggattacaggcgcctgccaccacgcccggctgattttttgtacttttagtagagatggg[135 bp omitted]acacggtcttactctgtcacccaggttgaggtgcagtgccacaatcatagctcactgcaacctcaagctcctggactcaggcagtcctctggtctcagcctcccaagtagctgggactacatgcacataccaccacacctggctaattgtttttgtttgtttgtttgttttgtttcatttttttcttttaagagatggggtctcactgtgtttcccaggctggtctggacctcctggcctcaaatgatcctcctgcctcagcctcccaaaacgatagggttattacaggtgtgagccatcacacccagccctccccaagaccttagaaagttgaaaaaaattcaagaattttttttcatatatccccattcacattattatgaattttcagagtacacattctttaactggaacaaccacatgatagatataccacagatagacatatcagatgacactctgatatgtctgatagttactctgatattgtgcattttatttgaattatctttggccttatacccctgcacaagtggaaaactatatcaaagcctcgtttgtcaagatatattactcagattagttattttgtttccaagagtagatcacaattccttaatcttaacagttttagggaaatctacagctattttggagtagtctaatccaattaagaaaagatacttctggaggttgaggccagagcatcgcttgagcccaagagttccagcctgtggtgacctgtgaccatgctactgcactctagcctgagtgacagaggaagaccctgtcacaaacaaacaaacaaacaaacaaatagatacttctgaaagcaagaaaggttactgagaagcataatacttattggctatctttgtgtgccttgtatgaagaacaatgtgttttattgagcacactgacataatttttttttgagaaagtaaaattcatctggatagatgatttttttttttaaagaaagtatgttcgttttattttgggatgatgttgccaagaaaatgaaaatcaatggttttgttactctcactttcttttccttttctaccttgttaactgttccaataactcttatgttactcagggagatgcttttatcatgttatccataaatgttttttgttttgcttggtgggggactctcagtaatttacttgcacattgtttctgtattacaagtgtgactaatgtttaaaatgaatggagtattatagtcttagcactggatatacagcctacaaagaacctttgtgagctgatttttgcagtgttttctaagcacttctgcaggaaacaaataaaaaaaaccccacatttaatgttaactctgttttaaatgcttcagctgcagttaaggtctgttacactcttttaatgcatttcttgtatctatataagtgttcaaaatgaaaattatttgatgtttgagttatgcttctgcccggtttgtgttctcaaccccatccacagacctataagatttgtttcagcaacctcattcttacaaacaaaactaacttacatacgtgcactcggtgcaaagtagatgccattgaaggtcaagaatatgtgttagatttctgtttgaggacatttcaacattttaaacagactaggaatacttggatttactcctacatctaggaatctcactgacattgtatcatcacagatttcaaaaattattgctactttattgaattttgaaaagtggctctcattaaaaatgattatttcatcttactttagctatgtggatagactagaacccttttacctcataataatttttgacggattgtccttgtcttacatttcaagatgtttagattgatgaataataattcatttttgttattcaacataaactaagattgttctaaatctgtggctacttctgttatgtaggctatggaaaccagttacataggcttttgtatagcatactaatatggaaaggaagtacctgtaagtgaatactcagggcagcatttaccatgatttttttggaaaattgtgacatttgagaagcatggagattgatgggtatgatactgcatttaaaaatattaaacagcatggagaaactaacattaagcgactgctatgtgccagtcactgtgtagtgcacttatatattatttatcttggctgggcgtggtggctcacacctgtaatcccagcactttgggatgccgaggcaggtggatcacctgaggtcaggagttccagaccaccctgaccaacgtggtgaaactccgtctctactaaatacaaaacattagccaggtgtgatggcagacgcttgtaatcccagctacttgggaggctgagacaggagaatcgcttgaacccgggaagcagaggttgcggtgagccgagattgtgccattgcactcaagcctgggcaacaagagcgaaactccatctcaaaaaaaaaaaattatcttaaagtagagaagctaacttgttgagagtcccccaaagcaaaacaaaaacatgatataaaaatagggatgggggccgggcgcggtggctcacacctgtaatcccagcactttgggaggccaaggtgggcagatcacctgaggtcaagagtttgagatctgcctggccaacatggtgaaaccctgtctctactaaaaatacaaaaattagctgggtgtggtggcacacacctgtaattccagctactcgggaggctgaggcaggagaatcgtttgaactcaggagctggaggttgcagtgagccatgatcgccccattgcactccagcctgggcgacaagagcgaaactccgtctcaaaaaagaaaaataaggatggggatattttacaaatatgcacaaatgcaaattatttaacctaaaactagtaagtcaggacgtattggcagctttcagccaccaagttttcctttttccctataaaatgggtcatgatgaagatgataataagtaagattaacagggtatgttgatgctagattagtcactgttgcagtttgaagacacatacagtaaatacatcaggtttttctggataaaaggtagtctagctagacaagatggctcacacctgtatgtaatcccagcactttgggaggctgagacaggaggagcacttggtacccagaagatcactctgggtaacatagtgagactctgtctctacaaacaaaacaaaacaaaacaaaacaaaacaaaacaattctgcaatctggatacccttatttatactaatcaacattgtattgctctgccagggttgtcataacagaataccacagacaaaacatggcaaaaccccatctatgtttaaacaacagaaattgtttttctcccagttttgtaggctgcaagtccaagatcaaggtgccagcagggtttatttctggtgaggactctcttcctggcttacagacagccaccttctctctgtgtccttacatagtctttcctctgtgtccaggtagaagagaaagctgtctggtacttcttccaataaggacgtgagtccttattagagtaccacccttattacctcatttaactttaattaccttcttaaaggcagtatctccaaattatagtcacatgagtgttaggacttcaccatatgaatttgggggggcacaattcagcccattacaagcatatactctccttatagctaatcagcatgagaagtcagattataaacaaaatactatttgggagcatgaactcaaaggtggatggtaagatgatcaaagccgttggtaatcatgatgctgtgtgccccagtagataggagatttatataggctaacttctgctgcactgtgctggagatagactttctattttgttttgttgaacttctcttttatcataaaaccagtccccttaaattatttttttcaggcagtttagttaataattttatggttatgagcccagcctaataatgccccccagtgtaacataaaaaacgtacagcaacctgtactcccaatttgattagatttgagtcttaggctgggcacagtggcttatgcccataaccccaacactttggaaggccaaggctagcagatcgcctgaggtcaggagttgaagactagcgtggccaacatggtgaaaccccatctctactaaaaaatacaaaaaaattagccgggcatgggggtacatgcttgtaatcccagctagtggggaggctgaggcaggagaatggcttgaacctggaaggtggcggttgcagtgagctgtgatagctccactgacggtggaggttgcagtgagctgtgattgctctactgcatgccagcctaggtgatagagcaagactgtctcaggaaaaaagatttgagtctttaactcctaaatcacattttggggccagctcttacattacctcacttttctagattgagcttgtccctttcaaaattctcagaaaaataatttttgacttagtttggagggtggggttgtcttcccagtaggtcagtgtactcctaagatcaccattgtatctgggtcctgcctccaggtttgtcactaacttgttctgtgacattatacaagtcccttacctctgagatgtttatctgtgaataagtagaataggcttgatattctctaaagttccttctgtgattctaattattcttacagcatattcataaagcactttcataaagcagtatggcaacatcattttgcctttgaaagaaagaattgtcagtatgtagagggtatttaaggctgagtgaataggtgacatcattagggagagaatataaaggaacataaaaaggaatctaggaccaggctttgaagaaccccaggacatagagcagggggagccgtcagagaaataggaggaaaaatgaaagtatttcaagaaatagggagtggatacttgtgttcagcgaaggtaagagattcagtaagacatgtcctttggatttggcaaatggaggtaatcgataatcttcacaaaagcaatttatttttatttgtcggagcagaagtcatatcacaatggatcaggcagaaatttgatgatgagtaagtggagcctgtatatgtcggcaactcttttgagcactgtttatgaagaaggaatgaaaaatgggaaatactgagtacttaattttctggtgagaataaaggggtaaagattgattacacagtgagaacagaaggagcaaagtccctgagaaggaggaaggaaatgatatatatatattgacataatggcctttggtaagtagaggacactgccaagtcataaagagagaaaaatgctgacatgggtgaagtgtaaatattttagtaggcttaatagtagtgggattggtgaattctctcactgcttttgttatttaaaaaaatgtaacagggctggatatggttcatgcctgtaatcccagcactttgggaggccaaggcagggggatcacttgagcccaggagttcaagaccagcatgggcaaaatggggaaacccagtctctactaaaaatacaaaaattagctggacatgttagcatgttcctgtagttccagctgctcgggaggctgaagtgggaggatcacttgaacccaggaggtcgagggtgcagtaagccatgattgcaccactgcactccagcccgggggacagagtgagaccctgtctcaaaaaaaaaaaaaaagaaagaaaagaaaaagaaaaaagaaagtcaatgtctgaaaataagaaaggaaaaaggagggtaaaacgttttgggagcaaaaacaaagaatgaaatagttgtcaaagtaaaaaaaaagtttattagcaggaatcatcaattttaggtttgagctttggcatcttaataactgggctaggcacagtgtctcaagcctgtaatcccagtactttgggaggctgagatgggcagatcacttgagcccaggagtttgaggccagcctggacaacatggcgaaaccccatctctataaaaattagcctgtcgtggtggtgcacacatgtagtcccagctacttgggaggctgagacaggaggattgtttgaatccgggaggcagaggttgcagtgagccaatattgtgctattgcacgccag[143 bp omitted]aaccacgtctctactaaaaatacaaaaaaattagccgggcctggtggcgggcgcctgtagtcccagctactcgggaggctgaggcaggagaatggcatgaacccgggaggtggagcttgcagtgagccgagatggtgccactgcactccagcctgggcgacagaatgagactctgtctcaaaaaaaaaaacaaaaacaaaaaacaaaaaaaacaacaaaaattagccaggtgtggtagtgggtgcctgtagtcccagctacttgggaggctgagacaggagaatcacttgaacctgggaagcagaggttgcagtgagccgagattgtgccactgcactccagcctgggcaacacagcgagactgtctcaaaataataatgataataataataataactggcacataatggaccgttggtatatatttgttgaattaagaatttgaagtggctttgtaattgtgtgattttcttcagttatgttcagcttcttagacagatcataagaatgcagatgattctggaggcactgcagttttacaaagttttacagtacgtatgattgggggaagaagaggcaaagtgaggatgttttcaagggaattttgaaaggcaaggaaaaatgttaaatcctttagaaaatggttaaaatgcagaaaagctttgaagtttttataagcttaactattaaaacactagtgggtcttttattttggctgtttcatacttgggatggttttaaatcatgctaaatggtcaaaatgccaaaaaaaaaaaaaaaagggttttgatgcttttataagcttaactgtttagaacctcagtggctctcttgtttggccttatgctatatttccttcttttgggaatggcaagaaggttttgaaaagttgttttttaaactgcaaatttattttgtttatgaagaaatagactgatgaaaataacttagttccctgggttatttcttacaaaacaaaatttcagactattatgttttccagagagaattttggagaaggaaatgtcagtatgctgttcttttttagcacgttgtgtaagagcacattatttgctcaaatgaaaacccctgttgcaatagcttaaaaacaaaaccttcaaataattgtgcaataccattgttataagtacgcactcatagacccaaaatgttttgggtaaaacaatgacactatgggaaagagtaaataggggcaaatgagttcaattatcagtgttttgtaggagaaaggttttagaatgttatttataaggcaaacctttttgtgccctgtttatcttttcatcacaaattaaataaattttacttactgtgatagagatgaatggctggctttaaaatatcttaaatatccttaaatatcttatttgtaaatatttatcatatatttagatatttacaaatgtttaaatatcttcaaaatattttttaaaagatattgcctataggatttggctgaatatgaacacacatagttttttttgtttttttttttgttttttttgagatggagtcctgctctgttgtccaggctggagtgcagtggtgcaatctcggctccctgcgacctccacctcctgggttcaagcgattctcctgcctcagcctcccgagtagctgggattacaggcgcaagccaccacacccagctaatttatgtatttttagtagagacggggtttcgccatgttggccaggctggtctcgaactcctgacctcgggtgatctgcccgcctcagcctcccaaagtgctgggattacaggcatgagccaccacacctggccaaacccacatagttttaagtatttgcagaacttaagtatagcttcaagttaaatgactggcagatggaaaatcattaacttttttatatggttccatttcaaacatcctcagttgatttttttattaataaaattcagatttgtgaaatagatttccattttgtaaacctattgtgatgctctagcatctttggtttttgttgttattgttttgtaattgcttgggctacattatcttttggctgaatcttcacacaagtatgacttaagtttgcagagtcaaactttaagcttctatgaactggtctgaatattttgtcctgtgagctccgatagtgctttctacttcacgatcttcataatagctagtatatattgaggtcacgtgaaaggtgaggcaatatgttagtattttatgtacattatcttgtttaatcctcaaccctctgatgtgtgtcatgttatctctgttttacaaattaagaaaaactgatgtttagagagatttacaaatttctccagtctgttagactttttgtttttttttgtttttttttgagacggagtcttgctctgtctcgcccatgctggagtgcagtggcgcgatctccgcttaccacaagctttgcctcctgggttcatgccgttctcctgcctcagcctccagagtagttgggactataggcgcccgccaccatgcctggctattttttcgtatttttagtagagacaggctttcaccgtgtcagccagggtggtctcgatctcctgacctcgtgatctgcccgcctcagccttcgaaaatgctgggattacaggcgtgagccatcatgcctggccctgttagactcttaagacctgactaaaacattgtcttttcatctaattttattaaaatgcctatttcatcccattctgttataattgatttcttgtgttcatttggcttctttaccagactgtgatcctcttgaggacagggacctccttatcctattaatatttgtatcctcagtgcccattggagacccccgaacttttaaaatgagagctgaatgaacaacactggcatcactgatacaataacaatgaggcatgtgctgtgaagttgttttttatagtttaggcattttgtacgtttattacctcctactcttttgatgtattggtatttatagtcacacatgcatgcgtatcaacaaacatacacatgcatacatagattatttcatctacacatcaatcatttgaaagtggcaattattgtcctcattttgtgaatccaaacaatgaaggactaaagaaaatgaaactttgcttaagatcacacaactaatcagtggcaaatctgggatcaaatccagatttttcagattttaaatcttatgattgtctacttaaggctatctatactaatagaaacctatattttatttcttgatgtgtttatttgcttattcagcattgaagacaacaaaacaaaggtatacacaaatggattgtatcttaaaaaggagaatattacagtgatgaatgtgtgcttttttttctagtgatttttataggctttcacttgttttcctttatgaggcataaattttgaaaatagttacaatagttagagtttagacaaggaataaattagcaccagctatcaaactacaggaagattggacccatgaccatatcatattctgatcagctaaatataaatctagcatgactcttggcacatacaaagtgttcagttagtatttgttcagtgaataggtaaacaaaccttatacaagcatcttatcaagtgacttcatgaattttctttcttaataatataaccccctaactcatatatctgactttgaattctaaattgtcactgaatccgctcataaaatataaaaatttgagccacttggccatgagaatactcctaatactcttgggtcttctattaaatatagagacgcgtgggtagtggctcatgcctggaatcccaccactttgggaagctggggcaggaggatcgcttcaggccaggagttcgagaccagcctgggcaacataactaaatgaatgaatgaataaatgagattatttatttatttatttatttataatctatgaatatattattcatatgtattcataacatatatttcctatgaatatttggaagtttggatagttcctgctggtgactattcttaaacagctttattgaaacataattcacatatcatataattcacccatttaaacggtatattcacatctatgcaactatcaaaacaattttagaacattatcatcaccccagaaaaaaactcacaactcattggcagctactccccatttttctccagctcatctgctaatccactttctgttatcatggatatgcatattctggaaatttcatataaatgggaatcataacaagtagtcttttgtgactgacttctttcacttagcatattttcagactccattgatgcagtagtatgtattactactttatttctttttatggctaatatttcattgtttgggtataccatataccgtatttcctatatccattcatcagttgataagacatttgggttataggctgggcgcagtggctcacgcctgtaatcccagcactttgtgaggc[134 bp omitted]gaggcaggagaaccacttgaactcgggaggcagaggttgcagtgagccaagatcatgccactgcactccagcctgagcgacagagactccatctcaaaaaaaaaaaaaaaaaaacctttggtctgttaacagtgtcactatgaacattcctgaattgctgagtcatatggtaactgtattttaccttttgaggaactgacagattgttttccaaagcagctgaactcttttgcattcccaccagcagttccgatttctccacatcctcactaacacttgttattattatcttttttttgtttcttttttttttttttttgagacagagtcttgttcctgtcacccaggctggagcgcaatggcacgatcttggctcactgcaacctccgcctcgggggtccaagcgattctcctgcctc[220 bp omitted]agattgtatctcattgtggtttaatttgcatttccttgatggctaaagatgttagacatctttttatgtgcttattagcaatttgtgtatctttggagaaatatctgtgcagctcctctgtccgtttattaattggattatttgctttttattactgagttgtaagagtttgcaggcccgatacacgcttcttatgaaatatatgtgatttgtaaatactttctcctgtgggttgtatttattttcactttctttttttttttgaagcagggtctcccttttgcccaggctgtaatgcagtggtacaatcatacctcagtgtagcctttcactcctgagcccaagcaatcctcccacctcagcctcctgagcaactagaactacaggcatgggtcatcactcctggctaatttatttatcttatgtaggatgggatctcactgtgtagtccaggctgggctcaaactcctgacctcaagtgatcatcctgccttggtctcccaaagtgctgggattataggcatgagccactgcacccggccccagttgtctttttataagtgtctgggcaagttttaatattgtattaaggactcagcatttattgtattaaggactcagcattttagccttttattgaagtgatgtgctttttgagtagaaagttttgctttactaacacctgaagaatgatacaatcacaggcaatctggtttttatatgttgtattacattaaagtaaaagcactgatacctgtagtatgaaatgaagcatgttataaataaagtacatttaactatcttaaacatttcaagtttggtttttttttttgcccatatcattttattcagtagaattgtttcctaaataaaactggtctatgatcttagatttatgtatcaacagttgcagcatcttttgtagtatattctatttttatataataatgttaaagggaatatgaaagaaaactgtaaaaaggtaaaatgataagattaattttgagtacacagtagtatgatatttaattgtaaattagaaggagttagactttatagtgtgttaacatttggagttactagtgcttgatatcctccttctgtggacagattacctccaaatttcaatctggaagatccctgaaataactactaggaaaaggtttacaactatatggcttttatatttttactatttgtattagaatatctatataaattgttcaatagaataactaaattgttcaaattttggttataaaagaaaaaaagtgtaaacacatcatacatatcatgtggcttattactgtgatgttattcctgtattcagttttattcagtcacagctacacagcagaagtttgtaatgtattgctggattttattttgctgtattagctcctcaagagttactgatctatgaaatggcagagaatggaaaaaattgtgaccagagacgtgtagcaatgaacaaggaacatcataatggaaatttcacaggtaaattttgatggtttgcagggaggagtgctatgggtttaaatgatatacttttcattggaataaaatagagatatattacttcttttatttttaatcttatattatcttcttagtaaattaaattatgggtcagtcagggcctgtaaggtgatatttcacagtgatggcagaaggagcctggccacaatcacataaacagtgttccaagtacaagattattacttgttaatcttatagtatggtcagtgtttatttggctttgctcagtgctcaattttattgtgctattttgtaattctagaagtagattataaacttactacactgttcttaaatatacagttatcaaaaaagttagaatgtgaatattatttaaaaatttattttaaaattatcgtttgagatgaataaactcatattttaaccaaattggaatttgtggtaaatttcagtgtatttgactcctgtttatacagttaccctgaaaatgatgacttttattaatatggatgatttaagtagaaactttccttcatgcatttaaaggaaaatgaaaaaaaagttttacttttgttgtaatcatactttttttttagcttttgaattgtttgacatctcaaacacatggcaaataatactctagtgtggtaatattttcacagcaatcctctacttttagaggaagtgcaaggaatctgaaatagtagttttcatttgtttgtttgtttgtttgctttttgagacggaatctcactctgtcaccaggctggagtgcaatggtgcgatcttggctcactgcaacctccgcctcccaggttcaagcaattctgcctcagcctcccgagtagctggaattaaaggcatgcgccaccacgcccagccaatttttgtatttttagtagagatgggatttcaccatgttggccagggtggtcttgaactcctgacctcgggtgatccacccaccttggcctcccaaagtgctgggattacaggcatgagccaccgcgcccggcctcatttgtttgttaatcaccatattgccttgcagaggacattttgcagcactgatctgacttttgggttactttggttgtcagtaaacttggcaatttcaccaagagtttcaggattcagagatgggcattgcatacatcatagtgtcttcccattaggagcttttgtgtgctatttttttctttccttttagagagcacatacatttgtatattcttcctcttctgctcaccccattggaatttaaaattaacattagcatgtcaaacttactcttctgtaccaggtgttttttaatattttagagattatgctataactgtacatgaaaaactgattcttaggctgggcgtggtgattcacgcctgtaatcccaacactttgggaggccaaggcggaaggatctcttgagcccaggagtttgagaccagccaggacaacacagggaaacctcatctctgcaaaagattttaaaaatttgctggatgtgatcgtatgcgcctgtagttctagctagctactcaagttctagctagctactggaaagactgaggtgagagtatcgatttagcccacaaggctgcagtgagctgcgatcacaccactgcactccagcctgggtgacagagcaagaccctgtcccccaaaaaaaaaaatttattctttattatggctgcttagtttttctttccattgtacgagtgtgctgtactttaatcactcttctgtcctctattggtaatatataagttattgattattttttgctagtacaaataatgctgtggtcaataaagttgtgcaagtcatttcaccttatacctaatcattcctagaaatggaattaccggtttacagtgtatatgcattttgtgctgggcgtggtggctcacatctgtaatcccagcactttgggaggcggaggtgcgtggatcacttgaggtcaggagtttgaaaccagcctggccaacatgatgaaacctcatctctactaaaaatacaaaaaaaaactagccgggcgtggtggcagatgcctgtgatcccagctactcgggaagctcaggcaggagaaccgctttaaccagggaggtggaggttgcagtgagccaaaatcatgctaccactgcaccccagcctgggcaacagaatgagaccctgtctcaaaaaaaacaaaaacaaaagcattttgtaatttcaatagatggtgacaattaatagctaaacttaattgggcacttactaagtgttaaactcttctgagaactttacatatatgagctcatttaatccttaaaatgaccctgaaaagtatgtactattgtgatccccattttacagaagagaaaactgagtcacaaaagtattaactaacttgcccaagatcacgtgactaatagaaggcagagccaggattggaaccaactagtttgcctcaccatttttgcgatctaaaccactttgttctgtaatatgatcctaggttgatagaatgcccttcatagaaggtggaccaatttagacttatttcagtaattttcccaaaatctatagctctatcccaaattcaactgctggaattttcagtaccatttctttaggacatcctctacaaaagattctgatgtttatcaaggcagggagttggttttgcctcagttgttctctaggtaacactgattaagaaatggcaactataatatagtagcccccttatccatgagggatacattccatgacccctagtggatataggaaaaaacactgtgttgttctgtatatagtaatggggtaacatatacaacgcggatgtactaaacaaagggatgaatcaggtcttaggctggatggagcaggactggcaagattttattatactactcagaacagcatacaatataaaacttaggggcttggctgcagtagctcacacctgtaattccagcactttgggaggccaaggcgagctgatcacttgaggtcaggagtttcagatgagcccaggcaacgtagtgagactgtgtctccacaaaaaccaaaaatattagttgggtgcggtggtacacacctgtagtcctagctgcttgggaggctgaggtgggaggatcacttgaccccaagagttggagtttaaagtgagctgtgattatgccactgcattccagcttgggcaacggaatggagaccctgtctcttaaaaaaataaaaataaatttaaaacaataaaacttatgaattgcttattttcagaattttccatttattattttcagaccatagttgaccatgtgttactgaaactgtagataaggg[136 bp omitted]gcaacctctgcctcccaggttcaagggattcttgtgcttcagcctcccgagtagctgggattacaggcgtgtaccaccatgcccagctaatttttgtattattagtagagacggagttccaccatgttggccaggctggtcttgaactactgacctcaagtgatctgccctcctcagcctcccaaagtgctgagattataggtactactagttgccatttttcacaagactctaggacttgctattagttgttatttgggagataaaactcttttcatctaaagtgattgaagagaataagcataaatgttagaaattctgttttaatctctgcactattgtttttcagacccctcttcagtgaatgaaaagaagaggagggagcgggaagaaaggcagaatattgtcctgtggagacagccgctcattaccttgcagtatttttctctggaaatccttgtaatcttgaaggaatggacctcaaagtaaagagtcttctcccactaccttttacatacacctcatttactcatttaaaaaatcctcagtaatctcttactttctgccctctactccatcaaaatggattaattacctttagaatattaccataggaacatatttattctcctttctttaggttgaagaaaaatagattagggaaagacattgctatttgctgtttgcttactggattatcacagttgtccactgttttttcatgttgaatctgcagtggagaacactgaaaaatacgatttttattttctctcctgattttaccattgggagaaatcaggtctgtgtaatttagatacactgattctttagcagggcaaggttcagcatatgtggcagttttactgatagtttgagccaatgaaaaagaactctgccatggaaatgtgttgtctttaaatttagtacttgtaagccctgtttcaagtaccataaagaacaagttgaacttttacatgccttatcttctggcatgcccttccaagttattctctgtactattatcttaacatttttattgtactaagagtttataaagtattttgtaacattttcagctgattttgatccttagggcaactccataaagaaggtaaaacaagtacattattataaacattttaggccaggcgtggtggctcacacctataatcccagcactttgggaggtgggtggatcatctgaggtcaggaattcgagacctggccaacatggtgaaaccccgtctctactaaaaatataaaaattagccgggcgtggtggcatgtgcctgtagtcccagctactcaggaggctgaggcaggagaatcgcttgaacgtgggaggcagaggttgcagtgaaccgagatcatgccactgcactccagcctgggcaacagaacgatactctgtctcaaaaaaaaaaaaaattagccggtcgtggtagtgcatgcctgtaatcccagctactcaggaaaatcacttgaacccaggaggtggaattttaggccatttgggaggctgaggtgggtggatcacctgaggtcaggaattcgagaccaccctggccaacatggtgaaaccccatctctactaaaaatacaaaaattagccgggcatggtggcgtgcgcctgtagtcctagcaacttgggaggctgaggcaggagaatagcttgaacccaggaggtggaagttgcagtgagccaagatcatgccactgcactccagcctgggtgacagagcaagaccctgtctctgaaaaaaagaaacaaagcccgggcatggtggctcacggctgtaatcccagcactttgaggggccg[132 bp omitted]gaggcaggagaatagcttgaacccgggaggtggagcttgcagtgagctgaggtcgcaccactgcactccagcaacagagtaagactccatctcaaaaaaaaataaaaataagtaaataaagattataaaaacaagaaacagaatcaggttggttaagtgtctggctgaaagtgcaacatgaagggtctctgacccaggtcctctgacttgaaggccagtgctctttctattatactataatgcttctccatattataagttgaggtttaataagatcaggctttgggtaaggaaaaggctacagtgggggttatgataagaacttgggttctctgcctatgtatcttcccttgacccccttctgttactccaagaggccatgatgtgtaaggaaaagagctcagcccagctgagctaggtaacctaactgtttcagcaagaaattgttctgagaatgatgaatgctgaaagtgagactgtgagatatttattttttttatttgtttttaagattatggcatcgtcaaagcattgtggtgtcttttttactgctgcttgctgtgcttatagctacgtattatgttgaaggagtgcatcaacaggtgagaggtcgagcaattctgtttctagtcttgcacattctctaattctctaatctcagtttcaaatgggatgaatgtgggttttatagaatttctaccctcaacattatctcataactagtatctcaaatgttttacttttaaaggcatacactaaaaatattcttgtgatgttttatggctgctgaggatttatatgtggtgtgtgtgattccttttaccttcaaagatttttttttttttaaagacagagtctcgctctgtcacccaggttggagcgcagtggtgtgatctgagctcactgcaacctctgcctcctgggttcaagcaattctcctgctgtagcctcccaagtagctgggattacaggcacctgccaccacacccagctaattttttttgtatttttgtagagatggggttttgccatgttggccaggctggtctcaaactcctgacctcaggtgatctggctgccttggcctccaaaaatgctgggattacaggccactctgcctgtaatcaaagatttaaatgtaactttcctgaaggttttccgtcacagcagcatgaatccgttaatcactgccaaagttttcttattttctctaacatacttttgtgacccatccaaataggtaggcctctcatccaaggttgatgattacgttttatttgtataaaaagacaggttcatttgcctgtagtctacatgtacaacattactgatgggaaaataggatgctttgttaacctcttttgttaaaatagcaaaacattaatgtattttaacaggaaatggttctagaatggtattttaaagcagtttactgccaatcacagaaatgactctagaatggtattttaaaacagtttactgccaatcactgaaatgactctagaatggtattttaaaacagtttactgctaatcacagagaagtttttacagttctaaatgcatttattttaaatatatctaaaattatcctcaaaattatcttattcataatttgctttttcctgtgtcctgtaaatagtaggactttaaaagtttagaaacaaggcttttattaaaggtttagaaataagacctttattccagttagattaatttttttgtcatctttgccattgtgtattaaagaaattaggcctcttcaatgggtttttaatcttattagttttttcctatttgaaacttactttagttgatttaattttgatgatggtttataaataccgcatttctgtatagagaattcacggttttcacctcatccctttttttcagtatgtgcaacgtatagagaaacagtttcttttgtatgcctactggataggcttaggaattttgtcttctgttgggcttggaacagggctgcacacctttctgctttatctggtaagaataattttattttaataagcaaaaatgatatttcctatctttttattggtgcttttatgtcagaagtaaaaattctaagatttgttttaattacctttgtgttttgtaagcattctgatcctccaatcagtgctttaagtttgacttagagttctgttttgtttttcctttagggttagtatttaaaaagcaaagagaaaaccccagttaagcaaataaggttgtttatttaaattagtttagcgtggaaggtttttcttttctttctagatttaattgcttaagcaattgttattttaataaatgaagtccatttaaatatgcaaaattccatgtgagaaatgtcttcccttacatcctctaacatcatttacatacttggatatttattttggtattcttgttgaatgtaattgatggagtattaacatgtagaactaaatgctttc[138 bp omitted]ggtgaaaccctgtctctactaaaaatacaaaaaattagccggacgtggtggcgggtgcctgtagtcccacatactcaggatgctgagg[268 bp omitted]aaccccgtctctactaaatatacaaaaaaaatcagccgagcttagtggcaggcgcctgtagtcccagctactcgggaggctgaggcaggagagtgatgtgaacctgggaggtggagcttgcagtgagccgagatcacgccactgcactccaacctgggcgacagagcaagactccgtctcaaaaaaaaaaaaagaaaaagaaaaagaaataagagagaatgaagatcaattttcctttgaacattcacaaatatactggaataatgtcagagctagaactagggagaggttgagttagatactgagggcacaaaatataaataggcactctcagggtcatgcagatacagaatggatgaataagtgcctcattaaattttgtgccccatgtgccttgcttgttcttgctgttcctgtccctagataataaattgaaaacacttccatatttgaaagcagtttgatcttcattggggaaaaacaggtgaaagattgtcaagcagtacccattgctgaataaaattcatcactacaagcacttgcaatctctgtgctataatgaattcatctctgaagcagctaggataagtattaaggaatgattgtctgcttggctcagaagggtactggattaatgatctgacgaatgctttgggaattaatctataatatatcatttctccaagtttatgggagtttaaaacttggaactttagaattatgttcatgtttgcttggtgatttaactcaaacagggacataaatcctagggaattaactcatatcactgtttttctaataactgcattcgtagtagaataacactacattcactagtagaggttgagggagagaggaaaagaaggaattacaggttacaggatacttttctgttcgtgtctagacctgtcctcatattccttgggaaaaccagattaagaaactcatttgtagcatttaattaatttggaagcctctgaaaagcaacccagatagcagactctgctgaatgtcaaaagagattgaaattatggctcatgcctgtaattccagcattttgagaagccaaggcgggctgatcacttgagcctaggagttcaagtccagcctgggcaacacatctctacatctctataaaaaatacaaaaattagtcgggtgtggtggcacaggactgttagtctcagctattcaggaggctgaagcgagaggatggcttgagcccaggagataggggctgcagtgagctatgattgcaccatgcactccaacctgggtgacaaagtgagaccttgtctcaaaaaaaaaattattttaaatgccctaaaattaagtatatataaaacagccagatctgcaatttatgaatatataatcctggctatagtgtgggagatagattgaaggtggaagagaagaggagcagttaggattatccttatgagagacacaagcttcccaggaggtgataggaagaatggatagcaaggagtatttataaagagaacttgtagagagaagtcaagcaaaatgaagacaaaagatggtatagatctttgatgttttaaaagattgcttggaatggaaatagcatttgggatgaaaaaggacaaatatgacagaaattttagaagtacaatcaagagtgtggtacgttattatggaggaagaaggaatgaaagataactcttggatttccttttgttttgttttaatatattttatgtgtatttaaggtatataacatgatgttataagatataaatatatatagtaaaatggttactattgtggaaaaaattaacatattctttatctcatgtagttacccatttttacgtttttactcctcatggcaagaacagctataatttactagtttagcaaaaactctgaatacaacacattgttattaactatagtcctcatagtgtatgtagagtacattggatcttttgacttgttctgcctgtatatttgctactttgtatcctttgatctacatctcctcccatctctatctctataaatgagatcttgcaacatttttctgtgtagttactggttttttactgagtgactgggtagattttgatgccattaactgtatagaaaacagttatttgttcacttgttcacatttattacatattatgtgaaagtatgtgaaaagagaaatttaaaggtatactgtaattatgctgcaagttaaatgagatcctcactttatccaggtaggttgctggtgcccgtagttgaatggaaagagaagggaaatttataaaggactgagaacgcctacaaaacaaaacaaaacaaaaaattattagagctgggcacagtggctcattcctgtgctcccagtgctttgggaggccaaggcaggaggatcgcttgagaccacaggttcaagagcagacctagcaagaccccgtttctgaaaaacacataaataaataaaagataaataaattagctgggtgtggtggcatgtgcctgtggtcctagctccttgggaggctaaggagggaggattgcttgagcccagaagctcaaggtcacagtgaactgtgattgcaccactgcactttaacctgggaaacagagcaaaaccctgtctcaaaaacaataataataataataataataataataataataggctttattgttcagtgtagttttaggtttacagaaaaattgagcagaaaagacagaggattctaatacaccaggggtccctaatccccaggccacagaccagtactggtccctggcctgttaggaaccaggccacacagcagtaggtgagcagtgggctggcaagcaagtgaagcttcatctgtatttgcagccgctccccatcactcgaattactgcctgagctctacctcctgttagatcagcagcagcatcagattctcataggagctcgaaccttattgtgaactgcacatacgagggatctagcttgcatgctctttatgaaaatctaatgcctgataatctgaggtggaacagtttcatcccaaaaccatcccccacctcaggtctgtggaaaacttgtcttccacgaaactggttcctggtgcccaaaaggttggggaccactgccataacacctttccccaccacacagtttcctctactattaacatattgtattagtgtaatttatttgttacaattgaggaaccaatattgatacattattaactaaaacccatagtttatgggatctactctgtgttatacaggtctatgggttttgacaaatgcataatgtcatgtatatacctatagtatcatacagaatagtttcactgtcttaaaaatgccctgtgcttcacctgttttttccacttccccacctgcccccaaacctttcacaaccactgatctttttactgtttctatagttttgccttttccagaagacactatagttggaattatagggtatgatccttttctgaccgacctctttcactttgcaatatacatttaaggtttttccttgtctttttctggtgtgatacctcatttcttttcatcactatttaataatattcctctgtatggatgtaccacccgtttgtgtatccattcacttactgaaggatatcttgtttgttcctgtttggcaattatttttaaaaaactgctctctctctctctctctctctatatatatatatgctatattatatatatgctatatatatgctatatttataaatacatatattttctgatagatcctgagtataatatatactctattgatagaacatgagtattaattactaatatatagaaaaaacttggcttttttaaggttgtttactaaccttatatcctgcaacattgctgtaattgcttaatagctccaagacttttttgatgattccttatgattttctacatagataattatgtcatctgtgaacaaagacagtttttctactttcccaatctgtatacctgttatttcctttcttgtcttattgcattggttaggttttcaaaataatgttgaagaggagtcatgaaggggccatcctgccttgttcccaaccttaatgggaaggcctctagtttctcacccttaagtatgatgttagctgtaggtttttgtagatattatttaccaggttgaggaagtacccctctgtgccaaatttgctgaggtttttgttttttttttttaaatcatgaatctgttggattttgtcccccaaaacccactgttttagatgatagtga[131 bp omitted]tctactaaaaacacaagaaattagccaggcgtgttgacaggcacctgtaatcccagctactcaggaggctgaggcaggagaatcagttgaacccaggaggtggaggttgcagtgagccgagattccaccactgcaccccggcctgggcaacaagagcgaaattccatctcaaaaaaaaaaaaaaaaaaaaagtcaatatttaaaaaagaaataaagtccaggcatggtggctgatgcctgtagtctcagcactttgagaggccaaggaaggatccctgcttgagaccaggagttcaagacctgccagggcaacataatgagaccccatctctaccagaaaaaaaaaaaaaagagagagacagaaggaaagagagagatgaaagaaagaagaaaaggaaggaaggaaagaaattgaatatttagaagcttggggagaaatctgttaaatataaaagaaatataaagagagatctagtatatgccatttccatttgaccaaatgacctttagttcttagacctttttgatcctgacttccatttaggatcccctgggtttaacagaaagaatgaagaagaaagagcatttataaaatataatttgcagaaaagcaaaaggaaaacaaaagatatcactagtctttattttttaattgactggttggggtggaaatcagtttgcaagaggttaagcactactaacaacaaaaaaggcaaacatcattgtcatactcatgctaatactagctggtcagttcttttatttttattcatgtttggtggccattttgtggtacccattcctatgggaagattttgcatccctaccttactgaactccagccatattatttgctttgaccaatgaaatgtgagcataagtgatagatgttgcttgagatctttgtgttgtttgttattacgtcataatctaacctatcctgactgataggcagctaacatttattgaatgtttactaggtggtagtctctgtgagcatcactttaaatgaattatctcacttaggcctcccaagagccaagctagtcaataaccaatagtgtgacaagtgtaaaaattttaattaataagcgtaaactatttacttgtgaactttggcaattatagaaaagagtaaaataagaaaccagaagcaaagcagagtcaaaggtttcaaaatctgatctgggtttttacttaatagaaacaatttcaaataatctctggtttttttaagcttatgccattttcttgctgattagtgatcaacagaattttatccttattggtcaccatttcttttcttttatatgtaggaaatgcagttgtgtttaggatatcctaattacacttactttcattttccaggcttaacataatcctcacttagggaaatgtgacattctcatgttctattatgtgctgatgaaacaggcacctctgcaatatacccatataactaaccctcaacaaagagaataaatgatcatattgggagagtagtctggtgaaaaatatgggcctccttttgataacagtttgtggtgaaaaagaaactaattttaacagaaaaaaatgtaattcattatttattatggctctctttactggaaatcgtagcttaaaagtgaaatatgaattttttttctgcataggcaaaatttcccaattaggtttttgaaatttgtgtttagaatgaatgattcctagagtgtggaaggtatcttttttggaagtatcatttagtaagttataattggttgtatactagtcacctaaaagacttactaaatttcctaaaatattagatacctacgtgtttggctttaaaatggagaatttgtcttaaatttatccgtaaacagtttcatttatatttttatttatttatttattgagatagcatctctctctgacacccaggctggagtgcagtgctgtgatctcagctcactgcaaccaccgcctcccgggttcaagcaattctagtgcctcagcttcccaagtagctggaaattataggtgtgcaccgccacacccagctaatttttgtatttttagtagagacaggattttgccatgttggccaggctggtcttgaactcctggcctcaggtgatccacccgcctcagcctcccaaagtactgggattacaggcgtgagccaacatgcccggcaatatttttagatataactgaaaggttataacttgaaattaagatatcttagaagtcctcatcacttctttaaatgttacaaataaaagttactgtttatttgatcattaaatttaatgaaaatcatcagggaaaaattactaaccatcaagttttgtaaatcgatttgagtaaagtgtaaatcaagtaatttgcagagaccaagtacctagcccagagggacaagttaagatactgtttatgcaagaatagtggttgctaaccagaaaggaggagatgaaggggaaataaataaattttttctgctgatggcttacggagagttggttgggctactaggttacttgctttgttctattaattttaatagttaaaaggtgggtttcaggaggcctgttaatttctgaaagcactgtacttgttatgtatcattgcaaataagctttttttctagcaagaaagaacctgtagtattcatcaggttctccaaagactgtgaaatgttaagaaccattcttctacaacttttttcaaaatatatctatatttggctgccactaggtggcattgctaatacagccaatatactgttgtatttgcagtttctagtctggataaatatatgtgtgtagagcaacttcacccaaaaaccaagccatcaaatggctctactaagccaggagacatattctgttatttacttgtattcatgcctacctaaaaccagtctacgcatgtaagtaaaaagagcatttcttaatagtttctcgcattcgttcattaattagttcagcagttaatagtctacctttctggccagcttatgcctgtaatcccagcacattgggagagggaggcagggggatcacttgaggccaggagtttaagaccagcctgggcaacaaagcaagaccccgggtttttttctttctttctttctttcttttttttttttttgagatggaatctcactctgttgcccaggctggagtacagtggcacaatctcggctcgccacaacttctgcctcccaggctcaagtgattctcctgcctcagcttagcaggtagctgggattacagtcgcgtgccactaccgcccagctaatttttgtatttttagtagagatggggtttcaccatgttggccaggcaggtcttgaactcctaacctcaagtgatccacccgctttggcctcccaaagtgctaggattacagacatgagccacagtgcctggccaagaccccatttctttaaaaaaaaaattattttaattagctgggtgtgggggtgaacacctatcgtcctagctactcaggaagttgaggtaggaagactacttgagcccaggagtttaaggctgcagtgagctatgattgtcccactgcactccagcctgtg[224 bp omitted]gaggcaggagaatggcgtgaacccaggaggcggagcttacagtgagccaagatcatgccgctgcactccagcctgggcaatagagcgagactccgtctcaaaaaaaaaaaaaaaaaaaaaacctttcctttcgttttgatacacatatttacatggaggacataactcctatggtatgcccagtgtcaggtgtaataccaaacatactaactttaagtccaatcttttctttaatattcaggaatatgcaagtgattgaaaccgattttgttaaaagaataaaatctttcattaaatccttcattcctatgataggaaatagggcctcttcagagtaaaacagctaggtttgaatgtctagtacaatattactagctgtgtgatatttggcaaatttcttaacttttaaacctcagtcattcaactgtaaatgggagtgataataatagtacccatctcataagactgttttgaggattaatgaaattacttgtacagttttcagctcagtacctagtaaatgcaaggtattcaataaatgattgctgctattataattagcaatatcactacgcttactctgatttatttttgaaatgtaataattttcaatttatatgctttagctggtcttaacaaattaggaacatttcccacaattgatttcagtacagtgttatagaataattgaaaaccactgatcatttcatttccaacaatgatgactaggcaatttggaccaactctcccataaaagtttcttaaaagagtggataaatttattattattattatttattttttttttttgagacagagtctcactctgtcttgagtggctgtcacaggctgcctcatgcctgtgatcccagcactggagtgcagtgctggatcccaggctggagtgcagtggtgcgatctcggctcactgcaacctctgcttcctgggttccagtgtttctcctgcctcagcctccccagtagctggaattacaggtgcccgctactacgcctggctatttttttttttttttgtatttttattagagacggggtttcactgtgttagtcatgctggccttgaactcctgacctcgcgatccgcctacctcagcctcccaaagtgctgggattacgggcgtgagccaccatgcccagccaataaatttttaaatatatgtttaaaggtgagtatatgtatatatgagtatttgtatatatgtttaaagagagtaaaagaattataagaccaagatctaagttatacagaaaacccaaagaagagagactggccaaggataggccctgataaacctgcaggctttgaatttgaactctaaagggccacactttaaaagatgtgatgaactagatataaatcaactttcaccggtactgaagctcaagtttaaataatcttttttttttttttgagacagagtcttgctctgtcacccaaactggagtgcagtggtgtgatctcagctcactgcaatctccacctcgtgggttcaagtgattctcatgtctcagcctcccaagtaggtgggattacaggcatgcaccaccacacctggctagtttttgtagttttagtagagacggggtttcaccatgttggccaggctggtctcgaattctgacctcaagtgatcagcccccctcagcctcccaaagtgctgcgattacaggcatgagctaccatgccctgcctcaagttaaaataatcttattatcttcttagaactgtgagtggcccagcccgtctacccactagaagcaaactagtctggaggaaagtaaaatcatcctaggttttacatgatctctacttaacttactgttgtattccaactgtctagaacagagcctagtactcaataggtgctcaacaaatatatgttgaatatattaatgtaaaatagaatctttgcaaagcctatgagagataaaataattcgacttcttttattggcaaaacagtctgttcctaacatctgagtcttatttgtgacagttgatgaaaaatgacctaatctatatatagctttttcttaatttgcataacagttttatattaaatattagtaaatcgttttatttctccagcaaataagtgcatgtacttcttgctgtgtaaacattttattatgctctttgcattcaatttacttaaatttagacaaaaaataggcacaatgaataattttttttttttttttgagatagagttttgctcttgttgcccaggctgtagtgcagtggtgcgaactcggctcactgcaacctctgcctcctgggttcaggtgattctcctgcctcacactcccaagtagctgagattataggtgtccaccaccacacccggctaatttttgtatttttagtagaaatggggtttca[132 bp omitted]tcaacatatgctaatatgcttgtctctggtttatctttatagtgaggtatattgtactttgaaataaagaatattaaataaattagaaattaatagcatttgtaaactgcatttcctctgtttttagttcttatgcaggcatatttttgttcattcatttgatatctaccttgaacaaattttgcctagcaagtagtgcaagttacaaatttcattcatttaccttatttgagtttgtatgtagattaggtgcaaagaagcttctggggctggcagatttttccaagatagcacctttttttttttttttttttttttggagacagagtctagctctgtcacccaggctggagtacagtggtgcaatcttagctcactgcaaaccccgcctcctgggttcacgccattcccctgcctcagcctcccgagtagctgggactacaggcgcccaccaccatgcctggctaattttttgtattttcagtagagacagggtttcaccgtgttagccaggatggtcttgatctcctgacctcgtgatcggccaggtagcaccttttaagcactcttttattgcatattaattccccaaaatccattgacagatttattttagtcttagcaagcattcaggttaccttttagaagatccagtacatgagcgatcaggaatgcttatttattctctcatgtagcggaaattatatccagagtaagaatagtaagtcaatgtttgcataaagagaacatagctgctgttgacctctttggttcatctctatgcagccagtttttgtgagtcaaaatttctatcttaataatggtctagaccgggctcggtggctcatgcctgtgatcccagcactttgggaggctgcggtgggtggatcacctgaggtcaggagtttgagaccagcctggccaacatggtgaaaccctgtctctgctaaaaatacaaaaattagctgggcgtggtggggggggcgcctgtaatcccagctacttgggaggctgaggtgagataattgtttgaacgggggaggcagaggttgcagtgagccgagattgcgccattgcactccagcctgggcaacaagagcaaaactccgtctcaaaaaaaaaaaaaaaaaaaaaaaagtctaacctagggctacagagcataccttctctttttcattttcttttatcttcgtttcttttttgagacagggtttctctctgttgccaggctggagtacagtggcatgaatatggcccgctgtagcctcagcctcctgggctcaagagatcttcccacctcagcctcccaggtagctgggactacaggtgtgcaccactacaccagctgggttttttttaggggtagaaacggggtctctccatgttgcccaggctggtctcaaactcctcggttcaagagatcctctcgcctcagcctcctaaagtgccgggattacaggcatgagccactgtatccggcctcactttttctgtaaaggatcagatccgtagctatttacacatcgtgggctatccagtctctgtgcaactactcagatctgtcactgtaacgagaaagcaattatagacagtacataaatgagtgaatgcggccgttttctggtaaaactttattcataaaaacaggtagcaggctggatttggtctgcagtttgtagtttgttaacccctgctccaactcattgaatgacagtagtacaccggaagagacatagtgagcctgggagccttaatgagagagctagctgtcttctaaggatttttgtatgacatctgtgtatttggttcacccatttgccaaataagtactatcatttctctcttcttgatcaagaaataacaggtttcacatgatgctttagaaaagaatatagttgtgcatatatgagttgtataaaaaaaattaagagtaaaaagaaaaagcttttttgaagggaaaagcagaagaatttcttctaaatgagctgtctgatgacaggaagatttggttccagtttcatgtaaccactggtatgttcaattcctcttaaataccagattttacaagattgcaaccattttgaggaataaataacttatggattaagtttagatgtcatgtgtaggatgaacaggtctaaagatctaaggtaccactgttgtaaaattacaatggattagggatttttgttaagtagatttttagctgttcttatttttaaaaagtaactatgtaagatgataaacatgttaatttgctttactatagtataaccattttgttatctgtatgtatactataacaacatattgtaagcctcaattatgcacaataaaatttatttctaaaaagcttaggccaggtgcagtggctcgcacctgtattcccagcactttgggaggccaaggcaggaggatcacttgaggccgggagttcaagaccataccagcctgggcaacctagtgggaccccgtctctacgaaaaaaattttttaattagccaggtgtagtggcatgctcctgtagtcccagctactcaggtggaggttgaggccaaggttggaaaatcacttgagcccagggaggttatgatcgcgccactgcactctagcctgggcgacagaatgagaccctgtctcaagaaaaaaaaaaaagtttagatgttgtacacaattaggagaagtgatggggttatttcattagccaccttgtaattatttcccactaatagaaatatgattcataattctgtaattaaccaggttaacaaaaacaggaactttggtacttgattatgagaaatgtattctggacatgctccttatatgcatgtacattatgattcatcaagttacaagacaaaaagatgattaaagaaccatttgtaaactgtatgtaacattaaggatttataaagcctgttcttaatagcaaaggagtccatgggctacaatttactctcctatataatgtgatgtatgtacaatttttgacactaggtggagcagtttcctggcaaaagacttcacaaagccccatatccctttcagttaagcccagcttctagacaaagaactgtaaagagaagaaaaacgatcgacaatcattttataatttaaaaacatacccaaatatttagctataagtagaaggctgaatatattttacaatttttctgtttgccatatattttaaccattggattttctcatgtttaaagtgttagttttactttctagaagcagtttggaagtagaaaagttgggaactattcagttacattgtagaatagatcaggttttattagaagctgtaacatcaaggtgttatcctttgaatgatatctgtgagccattttgtttcatatgaccatttttatagaaaaaaagtactttttgttataaattagatacaaagaaaattgtgagatacgtgcccctgtgtaagattcagagcctgtttctgctttaaagtttgggattatttcattattaaaatatgtgttaaaaattgtacatttaccctgaagtacaggtcaattgatgactaaaaagaaaacaaaaaaaattatacatttaaaaaatctgacatcttaattgctttttcatatttatgacctcctctgtatatggcaccctaaggaggaagtactgtatagtattctgcactttttaaaagctgttttttccttagtatagacatttctgatactttttgactcttggctattgctaaaagtaaatattatttggaaaactgcattcatatgggttgaaataaaatagtgaaatagtttcagtaagtgaaatattgtagtagttaataccataaagtggaatcattctttttttaaaaaattgttagccagcttcttccctatcaattcagcttgacttctgactattgctttattgctcatttgtctatcctccttttaagacaaaaaagaaattaccaaaagttaaggctgtggtgtgacttgataccagatgcttataactatggctataagcatgcagtgactcagtgctgtttcaggaagaccaacagacccttcttagaaaaaaatctatttgccttttgtttgatgaaggcatgaaagctcttctccctgtctttccctaaggaatgactcatatattaactctgctgagcatcaccacatcaaaagaagaaaccaaggtcttcaggacatcaggctgggtttttgccaaggaaaaggggtatgcacagactgggtaacttcctgcccttaagtttattaatgtatgcttaaatgaaagccaagaaaatttagtttagcttaaatttgttgttgagcatacattttaaacaatttatactagccccccccgcccttttttaacagctctcataaatatgtagttcatttctcttgaatacttaagtcaactgtatgatcaaaagttgcttgggtctagagaacaaaggtgaaacatgccttctttttctttttctttttcttttttttttagacggagactcactctgtctcccaggctggagtgcaatggcgcgatcttggctcacggcaaactccatctcccacgttcaagcgattctcctgcctcaccctcccgaatagttgggactacaagcatgcgccaccacacccggctaattttttgtatttttagtagagacaggagtttcacaatgttggccaggctggtctcgaactcctgacctcaagtgatctgcccgcctcagcctcccaaactgctgggattacaggcgtgagccaccacacctggccaaacatgccttttaatatggattaattcaatataataaaaatagcttcaaagacagtaccttataacttggagcatgaactaatactatagagttcatatttcttttgttttggccagcaattttatatttgcacttttatagtataatctcatatttctaccctgtgacctaggtaacaagcattattaggctttttgttaaacaaaggaagagatagaagttaccaacagtaatttaccaacagatttagaaaactgaaatccacattaatgcatgccccggttactgctttttgacagtttgtttctttgttttttgttttggtttttggttttttttttttttgagacagggtcttgctctgtcgctcaggctggagtgcagtggcatgatcatagctcactgcaaccttgaactcctgggctcgagtggtcctcccatctcagcctcccaagtagctgggactacaggcatatgccaccacactgggctaatattttttcttagtagagacggaatctcactgtgttgtccgagctagtctcgaactcctgggctcaagtgatcctgctgcctcggcctctcaaagtgttaggatttcaagcatgagacactgttcccagcctgtactgcattttgtagagaccagaggcataacttgggaccttcttcacaaaaagaatataaacactggttaaacttgtcagtgcccattgggaatcgatattttacactctagccttctagaattatttgctgtagaccataaccttgttttctgactctaatgagaaaaacaatgattaaaaaaattctgaagagaattcctgtgtttgcaaaagggtttctgaagtcccctgaaagaaaacaaaggttttgcaagtcatacaaacaaccatttttcatctttttttgtttatttatcacccagatattcctaatgaatcacattccagactaaccactgactgcttttgttccttagtgaagaagtatggcaaataaatgttttcccagtgaatcagcacaggattcttgattttattacctttgccctaaactttccagacaaaactaattggaaattttgcctttgggatctcacttgacttctgtgtatagatgatggattaggctatgaattgacattacagatgttgtccaaacaactccagtctttaggaatgttttatcagttctgagggagccgtctagagtggaagaatgtctgtctgtctgttttgtctgcttgccttccttaaaaatactcatacacacacaacacacattctgcactcttaatgtgatgttgtagtcttcatctcggttgataagtatacttgcctgaattaggctaataattaatatgaacattttaggtctttcgtttttaaaagatatctctgtaagacaggaccctaaagtaaacccaacagtattctgtctctggtcttttggatggtatactgtttttcttgatgaaacatagacatgagtataaccttttcagtcctttaaatgctacaaagtgtgtgaagaaggtacaattatagtaaatcatgagccgctgtagtataaatccagaaaacttgaaaagttcaaaatccagaaaatgttttacttaatattaagcagcagtgtacatactgatttatcattttactaatatgattttttcacaaattcaagtatgaatatattcacccctttcttactatgaccctaattagtgtttgtggcacaaggatttctttctctgggcttaacatagatactatattattatcagaaaactacttaaaactcttcactaccagattaggatggagatagatagatagatagatagatagatagatagatagatagatagatagatagatgtggttttgtataattttacccttctaggacaattttttttgaattctaagtttctcttaattagaagaactagtagtgtattgttattcttaaagctagagtaaaaattgattacatagaattagtttggtttttttctaatcactaaaacttttctaatcactaaaactcatgaaagaatgtaaatcatggaaatgtaactttttaaacttatgtaaaaagagtttttaaaagataaaatatctttttccacagacaagtacctacatctgctcttactagaaatcttaccctttcatctaagtatagtttgctctcacccagacatactcctgcctggccaagcactacatcttttatcctggacaaggcaaaattattccattaccaatctttggaaaatataatgtaatacagctcatgagactagatatatggaactctgaaatgaagcaaatccagatgtccaatatgttgcaaataaccaagctatcttgttgatttaacttcgtctagaataactatactgagttaccaaaaataaaacagacctttatttgccactttttttttttttttttttttttttaagacagggtctcattctgtcacagtggcgtgatctcagctcacagcaaccttgaactcccaggctcaagcaatccttccacttcactgggactacaggtgcacaccaccatacccagctaattttttgttttgttttgagagagagggtctctccatgttacccaggctggtctcaaaactcctgggctccagtgagtgtcccgcctcagcctcccaaagtgctgagaatacagacatgagccaccctgccttgcctatttgccactttaagatgtactccctgtattgatctttaccttgccacatgtcacatccttttaaatgtgttcacactcattttatagcacagcagatggtctgtcttggcaaatattccatgtgtacttgaaaataatatatatttggctcttgctgggtggtattttctatgttattcaaatcttctgtgtccatacaattatcagtgtagttgttctatcaattaatgaaatatagatgttgacgttttcaactatgtatgtgccaggcatggtggctcacctctaatcccagtactttgggaggccaaggcaggaggatcccttgaactgagtttgagaccagcctggacaacataggcagaccctgtctctacaaaaaatagaaaaattagatggggccaggtgtggtggctcacaccagtaatcccagcactttgggaggccttgttgggagaatctcttgagcccaggagtttgagactagcctgggcaacatagggggacccatctctaaaaataacaaaaaaaaaattatctgggccaggtgcgccggctcacacctgtaatgccagcactttgggaggtgttggtaggaggatcccctgagcctaggagtttaagcaacacagggagacctgtctacaaataatgaaaaaaaattagctgggctgggcactctggcttacacctgtaatcccagcactttgagagactgaggtgggtagatcacttgagcccaagagttagagaccagcctgggcaacaggcaaaaccccacctctacaaaaaattagccaggcgtggtggtgtacacctgtagtcccagctacccaggaggctgaggtgggaagatcaccagaactctagaggttgaggctgcagtgagccaagatcttgccactgcactccagtttgggtgatggaatgagagaccctgtctcaacaacaacaacaacaaaattagttggttgtggtatcttgcgccagcagtcccagttgggtggatcacctgaggtcaggagttcaaaaccagcctgaccaacatggtgaaaccacatctctaccaaaaatacaaaaattagctgggtgtggtggcgggtgcctgtaaccccagctacttgggaggctgaggcaggagaattgcttgaaccccagaggcgaaggttgcagtgagccaggatcgtgccattgcactccagcctgggcaacagagtgagactctgtctcaaaaaaaataaaataaagaaatttctagctataattggggatttgttcatttctgtgttctgtcagtttttgctttatgtattttcacactctgttattggttgtatacacatttagaattggtctgacttcctgagaattagaccttttatcatttgttcctatgaatctctgttaatattctttgtcattaaatctactttgtctaatatcaatttagctactttatcttttttatggattttttaaatggtttttcttttcccatttctttactctttcttttctgggttcttaatatttaaagtgggtttcttatagacagcgtgtactaatccagtgtgacagtgtctgcctgaatttatacatttggtccatttgcaattaatgtagttatcaatatgattgggtttaagtctaccctcaaactgtttgtcatatctaatttttcattcctttttcttttttctctgccttcttttggactgaggatttttttgttttgttttgttttgttttgttttttggtgttttttttttttttttttttggtattgaatttatttgcttgtttgttctacttcttttaaaatttttagtggtatagctaggtgtagtgatgcatgcctgtggtcccagctactcgggaggctgaggtagaatctcatgagcctgggcagtcaagactccactgagctgtgatcacactactgccctccagcctgggcaacagggtaggaccctttctcaaaaaaaaaaaagaaaaaaaaaattagtggttgtcctaaggtttgcaatatgctccattaacttacagggtgaacaatgaagtattgttttctcattttgtataaaatataacaaccttataatagtgttcttcatttcctcctcccataatttataatttatgctttagttgtcatacattttacttcttgtatattttacttcctcatatgtcgtaaatccacagtactgttttgaaatatatttttttgaaatatattttccctagctcccagattcacaggtatttttttctttgacattttaaagaagtaattctgatgtcctgtggtttgcattatttctgatgaaaagtctgacctatttttccctgtagatgttttatttttatctactctattgtttttaagacttttcctcttgtcattgaattatagcaatttcattatgacatgattgtgatgatttttagcagtttgattatgttttattttctattttcttttttctttttttgagatggcatcttgctctgacgtcaggctggagtgcagtggcgcaatctcggctcactgcaatctccgcctcccggattcaagccattcccctgcctcagcctcccgagtagctgggattacaggtgcgcaccaccatacccagctaatttttgtatttttagtagggatggggtttcaccatgttagccaggatggtctcaatctcctgacctcatgatccacccaccttggcctcccaaagcgctgggattacaggcgtgagccaccatgcccggcctatatgttttcttttcttttcttttttgtgctggcatgcagtgttgagatctcagctcaccgcaccctctgcctcctgggttcaagcgattctcctgccccagcctccccagtagctgggattataggcacttgccaccatgcccggctaattttttgtatttttagtagagacaggtttcacc[143 bp omitted]gtttcttaagtctgtggattgatacttttcatcaaatctgggtctgtttctattgagcaatatttcttttggttatgagttataatttgctgcttcgcatatctagtaatattatattgagtgctagtaatttttaattgaatgctagatatgtagtattaaattgttgattgtatggattttgtcttccactatagaacattgatgtggggggagggtgaaggggacaattaagttacctgtggatcagcttgatctttttaagacttgttttaaaccctgttagggtcagactagagtagctttcaccttaggaccagaaggaaaggtcgtacctacccaggcatgacctttctgggttgaatgctgagtctctctactctagctggttgatcacaaatgtttcccaggcctgtgtgaactctgggaattggtcagtttacaaatccccagtaattattcttttcccagtagttcttgtagttctttgcctggacttgtggtctcaccttagcatgcaatgcagctttgtgtgccagagtctgaaggggacccctgtgcagatttctagagttccttctctgtgtagctttctcttttctggtatactgcctcataaattctgactgcctcagccttcttgaatcctgaactcgtgaaccccaatctcattctcaactcggcaggagcaacatgctttgtttgggctcttgctcttttgaccatggaatttttggcaggcatggaatgtgtctacagacaagaagccagagtcaatgtatggtttcttcatttttatcccttctcttagtaatcaaagccctgtactgcctgtagtacaatgtctaaaaagaattgtcccatatattttgtccagttttctaattgtttgctatagaaatgaaagtctagtatccgttacttcatccgccgtgagacagaaaaccttcagccatagaccaggatccctaacccatgctcccacaagagttggaacctgctgctcagtaaatatataaattttatatcctgtggcaggttttatccagttaggcttttcaattaatactatagctgtttgggtctttaccctcttgtttctttgtttagtatggttaaaaatgtgactcatatttgctacattgtagtgagacttgtagtttttagaaaatatactttaaaagtagtttgaattatgtgtaacttttaaaacttttaatcaaaaatttttttatttgaatttttcatataaacatattttttcattcaaatcggttatatttaaaaaccattaagctaaaatgttgaatagaacttgtgaggtttcctatcacttaatatagtttaaactatgaacaaaggacaagaaactgagttgttaatgttcattttgtctgggaaccaccacatctgcctcaaaggctgagtaatcatgacttactagtgtggttatggaaaatatatgtcagtttagttgagtgaatgaacagacttctttagaagaaagaattctcaaatcagagacttgaaaaaacattctcaaatcagattgttgaaaatttcccttttcagaataactaaaaatgaaaactataaagaacttttattttattggataatgtgtttaatctgttaggatacattttttatatttctggaatgcaaatatagctttttctttcctatctatcccagaaatctcattattttagctcccagagcaatttatttttgttcacttgaaattcatttctaactttagctgtagactacctgtagccaaagaggacagtaacatggggacagcatggacaaactcttaaattttcttctttttcacttattggcattcatatgtctcttttgtgttttctaatagtaaaggtggaagttacagctgatttcttcttttttttttaattatgtctgatagctataattgtatgaggagaaatgtttcacaaactatgcagttattctgaatatcacaaactttggggtttttttgtagtatcacaaaataattcttttttcccccaagtgtgaaatctcttgtgtgcacctggcatttaaagaaatgattgtagatttcatggttaatcataagttttcaaaaacctaagtagtcaaagtattttcaaaatcttatataattattttaatactttaatatttctgcatttccaagaattaaaagtccccaaaaagaggaacaaaggctaaaacttcacatcgatttttttgatccagaaaaaactaataattaactgattcagttccaaggatttcattttttaggtattattttaacagaaaatgccgattctatttagagataaatatcacatatgtgtgaacaactttgtatattaacatcaaacaaaattttattatcttgatagtagaatgtcttagttttatttttatcactagattttatgtactttgaaccacagattctttcatcaagtgatcttaaaatactttcttatacacagagcccacttacttttctgtgggactgtctcatttatgaaaaatcattggagaaatctttaatagaaaccttcagattcagaaatacttgcacaatataattagtaataaaatctcgtgtatatatatgtaaataattttattctacaaataaagtatttatcttcataatagctgatggctgctagttactgtatgctagaggacatctatcaacctatgcttaagggacccaggaatttatattttaaccaactccctagtatgcagacacctcatcttgtgcttttaggaaccattgtgtaaaactcattgatactggtttcacagttacatttttgctttatgatctcactgggaaaggttacatgaggtggtagatcaccagctgtttttaagtaaggacgtaaagtgatattctcaaattgtgcctaaaagaacagtggctcaggaagttttttttaataaaaggaattatctaacaaatgagaaatatagataaataaaataaaagtcaagcaaggaattagatcagtggttgccggggactaggacttgagggagggaattggccacagaggaacacaagggatttttttttataagggatggggccttgttccgttgtccagactggagtgcagtggcacaatcatagcccactacagcctccaacacctgggctcaagcaatgcctcctacctcctgagtagctgggactacaggcacatgccacaatgcatggctaattttttaaatttttgtagagatgaggtcttgctttgtagcccaggctggtcttgaactcctggcttcaagcagtcatcctggctcagccgcccaaagtggtgggaatacaggcatgagctgctgtgcctggccaagggatcatttttgcagtaatggaaatgttctgtatcttgattggtgtggttatatggctgaatatgttcgtcaaagctaattgaaatgtagacctcaaataagtgactcattatgtgtaaattttacctcaataaatctgatttttttttaagtcaaccaggaagagattctgggaaggattattttcttcatattactaactgcatcttgaaattatttagaattatttttgttctttgaaagctaagatttttcttacacagtaattaatatatttttaaaataatgtgtattgataattttttaatagttcttatcagaagtttcttgtatttgttttatagggtccacatatagcctcagttacattagctgcttatgaatgcaattcagttaattttcccgaaccaccctatcctgatcagattatttgtccagatgaagagggcactgaaggaaccatttctttgtggagtatcatctcaaaagttaggattgaagcctgcatgtgggtaagatatgcattttcatatttgtttaaaactaacctcaccatcttgatagtgtgtgtaccttattgaaatggaatctaaacatattccttgtcagtaaatgattcagtcagtaaccagctacctacttccaaggcaaaagaaaccttttagagcatctcctattcatgaatggcattgagaagaaaggcatgaaccatatgtatcacaaagcaactgaggccaagtagactccagcagggcaagggagtacagatgatggaaccacagttgagccttgaaccatgtgtgggttaggggtgccaaccccctgtgcagtaggaaatccacatataacttttgactccccaaaaacttaactgctaatagcctactgttgaacggaagccttaatgataaatagtagattaacacatattttgtatgtgttaatacagtattgtataccatattacaaagaaaattataagggaaaggaaatatatttattattaattaagtggaaacggatcatcatttccactccattttcatgttgaagaggctgaggctgaggaggaggcggagggaaagaaggggttggtcttgctgtcttaggggtggcacaggcaaaggaggtggaggaggtagatggggagccatgagaggcacacccattatcacttgtactggcacagttcaaatccatgttgttcaagggtcaactgtatactacattataaaatttgttctagtatttctatacctgataaacttttagaatttatctaagagttatataaaatatatataaatattagattggtaatatatagttatatataaatattagattggtaaatgtcatatgtcttactttttttaatttaaaattttacttttatttatttggcaaataaaaattgtgtgtgtgtatatgtatgtatgcatttatttatttatatatttatttactgagacagggccttgctctgttgcccaggctggagtgcaatggcgccatctcggctcattgcagcttcaacctcctgggctcaagtgatcctcccgtatgtcttacttttagattaaaatactgtgctctggctgggcctggtggccatccctgtaatctcagcactttgggcggccaaggcaggcagatcacttgaggccaggagttcgagatcagcctggtcaacatggtgaaaccctgcctctactaaaaatacacagattagccgggcgtggtggcgcatacctgtcatctcagctactggggatgctgaggcatgagaattgcttgaacccaggaagtaggggttgcagtgaaccgagacccgccaccgctctccagcctgggctacagagcgagactacatctcaacaacaacaagaaaatattatgttcttagagaactcatttcattttctgagttattataatgctaactaaagtaaggtcagacatttcttaatataaaccaagccttattatagtgaacgtatcaggctgtatgatcgtatatggcaattttactttcagttgttccagttattctttttgtggtttgcttaagtttattttacaaaattctttggacagcatgttaagtggcagatggattctaatccacacaattttttttgtgtgcctaaatttttttttttgctttttttttgagacagtcttgctctgtcgcccgggctaaagtgtggtagcgcaatctcggctcactgcaacctctgtctcccaggttcaagcaattctcctgcctcagcctccccagtagctgggattacaggcacccgccaccacgctcggctgatttttttgtatttttagtagagacgggatttctccatgttgggcaggctggtctcgaactcctgacttcaggtgatccaccaggcgtgagccacctcacccagccctgtatgcctaaatttattcaggcatccgtaggaataattcatgggttaaagatttcttttaccatttgaggtttttttttttttaactcattgggatttgttatgttcctgtaattttttcccactaacaatttcttaggaaattaaagattatggaacagatcacttacaaatcttaactcattaaaatgagcatgaataccataccctcaggagaagcagagttttgaaacacagttaagtgttagcaattgtgttctgctttaaaagaattataaaggaaataccatcatgttgaatttgttgaatatgaaagacaggaaaaattgtcatgtttcctgttgctcttttataaacactggaaacaaatttattatactagttgcatatgctttataaatttgatgacattagtcttttgatgaaaaaaatgttagaataacagaagatacttggaacatgctagaaaagggactttgtatgtaaatttgtctttttttcttaatattatacttttgttcttcaaaaattatttacattgctggattaaccttaaggccaacaaatgaaaaccactatctcggctggctgtgataactgcctcctccaaatttctgtagtatatattgtctgtagtgcttattaggcctggctttacacatgctttaaattagttaatttggctggtatggtggctttcttccccaaataatatttaggatcctaaaaaatattaaatataccttaaaagtattagcatcatagtaatcagcattaagttttgcacatagggctgggcatggtggctcactcctataatcctagcactatgggaggccgaggtaggtggatttgagaccagcctggccaacatggtgaaaccccatctctactaaaaatacaaaaaattagctgggcatggtggctcacacctgtattctcagtgacttgggaggctgaggtaggagaatcacttcaacccgggaggcagaggttgcagtgagccaagattgcacctctgcacttcagcctgtgcaacacagcgagactccatctcaaaaaaaaaattaattaatttttttgaaaaagttttccatgtagtataggaatgtcaataaatactgattaataggtcaaatgtttgctcttctttccttctttgtaactgtctcgttatattaaaaatacagcacacactaagttatgtttaaatttgttaatattgttctcaacatttacaaggacagtcttcaacaaatggtgctggggactgggtgtagtggctcacacctgtaatcccagcactttgggaggccaaggcaggtggatcacctgaggtcaggagttcgagaccagccggaccaacatggtgaaaccccatctctactgaaaatataaaacttagctgggcatggtggtgggtgcctgtagtcactgctactcgggatgctgaggcaggagaatcgcttgaacccaggaggtggaggttgcagtgagctgagatcacaccattgcactccagcctgggcgacagagcaactctccatctcaaagaaaaaaaaacaagggggatgctgtaaaaactgaatatccacatgcaaaagaatgaagttggacccttaccttacaccatatataagaattaattcaccgggcgcggtggctcacgcctgtaatctcagcactttgggaggccaaggcaggcagagcatgaggtcagaagttcaagaccagcctggccaagatagtgaaatgctgtctgtactaaaaatacaaaaaaaaaattagctgggcatgatgacaggcccctgtagtcccagctacttgggagcctgaggcaggcggctcacttgaggtcaggtgttcaagaccagcctggccaacgtggtgaaagttcatctctaccaaaaatacaaaaattatccgggtgtagtggcgcaggtctgtaatcccagctactcaggacgctgaggtgggagaattgcttgaacccgggaggcagaggttgcagtgagccaagattgtgccactgcacttcagcctgggcaacagggtgagactctgtctccaaaaaaatataaataaataaataaaatgaaaactttttttttttttttttaaagacagagtttcgctcttgttgcccagggtggagtgcaatggcacaatctcactcactgcaacctccgcctcccaggttcaagtgattctgactcagcctcctgagtagctaggattacaggcatgcgccaccatgcccagctaatttttttgtatttttagtagagacagggtttcttggtgaaaaagatagatttttttaattcctgctctccagatttttatcattaaacttacatttcttaatataaaagcaccttgctgcagatttgcttgtgagttcacttgacaaaatgttttttccctacctcacctgacaaaactttttaaaagtacaaattcagaatttttgtctttgaataaatctttgaatgaatctttgaataaaattagcactccaagaagatgctgtgttatcagttggtttgcatattttgtgcatattaaactcttctctagtttaagaaggatttaagggtaataaatttgtatgtagtagatggtttggaggagagctttctgaattattgcttgactgtacataccacttattttgcagtaaggaagccagtcattctctctccttaattaaacttaggctgacagttttcagtgttccacaatttatgttttgttttgaatataaacaaatgtaaagaattttgtatcttatacaaatatatatttgaattttatagagaatcataaaattgtaaggattatgaaatgatgagacttcagtatctaatttgagataaataaatgtctgtgtctagggtataatgtgttttgggacacctgcctggatgactaaattcccttgttatttatttgcataataagagagtactgactcatgattcccattgtttcttgctaatatgggaaaacactaggagaattaaactaaaatataacagtaaatatagtcaactacgtataagacagtatacagcccttgatttcatttcagtccattatgttacttccttcttaacttttaggaaatttgtcatgagcttcaatcacatgattgctttaagaactgttgaacatttgacttaacatttgaacttaggagaagttcatgttttgagtaagatgttacactttctgtcctacttttttctatggaagattttccaaaggtgcagagaattataaaatgaatttaatatactctcactcaagttcagctagtattaactaatagtttatattgttgtatctataccctttctcattctcttctcaattatcttgaagctgatcccagatatcataatacacatcatctgtaaatatatcagccttggggcctaaaatgcattatcacacctaaaagaaactgtagtagtctcttaaaattcattatccaattagtgttcaaatttttctgattacgtttatttctttttttttttttctgaggtgggatcttgcactgtcacccaggctggagtgcaatggcacaatctcatttcactgcaacctcctctcgtattcccacaattctcctgcctcagcctcccgagtagctgggattataggcgcacaccaccatacccggctaattttttgtatttttagtagacatggggtttcacaatgttggtcagactggtctcaaactccttacctagtgatcctcctgcctcagtctcccaaagtgctgggattttatttcttttcacatttatgctgaagaaactgttaaataatttcccatggtctgaattttactgactaaattctaattagtataatttaagcatgttgctctgttccttgtgtttcctttgagttgataaattgtgttttttttttttgtaaataggaatacactccatagccttgtgtatttctatcacgagatacaatgtctgtttgtccttcctttttgtgatattagcaccatggatgattttttattatatatgtccattattttattagaggttataaaatattagtatcccagttacattacaccttttttttttttgaattattaactggagacagggtctcactctgtcaccaggctggagtgcagtggcacaatcacagctcactgcagccttgacctcccaggcttaaacaatcctcccacctcagcctcctgaatagctgggactaaaggcacaagctaccatgccaagctaattttttgtagaggcagggttttgctgtgttgcccaggccggttttaaactgctgggattacaggcatgagccactgtactgggtctgaaataatactttgatgaaggaaaacttttccttgtcactaatttagttaccccgagatatagtttatatcagaaaaagataaatacttgatctttattataccagtttttaaaataataagttggttctc[132 bp omitted]cttgacctcctgggcccaggtgatcctcctacctcagcctcccaagtaactgggaccacaagtgcataattttttgtagagacagcctcattatgttgcccaggctgttcttgagctcatgtacataagcaatacacctgcctcagcctcccaaagttctgggatgataggtgcgagccatgacgtctgaccaacttttcttatttagcaatatatatgatttggtttttgcctatatccatgtatatatgtctctcctgccttctctgtctgttttttgactaaatgtaggcttaatcttttggcagttaagtattctttttctcttttttctttttttttggagatagagtctcgctttgtcacccataagcttgctgcaacctctacctcccaggttcaagcagttctcatgcctcagcctcccaggtagctgggactacagtcacgcaccaccatgcccagctaattttttgtattttagtagagttggggtttcgccatgttgccgaggctggtctcaaactcctgagctcaggcagttcacccacctcggcctcccaaagtgctgggattccaggcgtgagccactgtgcctggactctttttcaaaattcttgtttcaagtatggataatgtagttacacgtggaaattgttggttccacccattgtgaatacaaaatatttgaatttgatttggtcccttgggaattcttttcagagcatttggaggcagaaccataagacagagcaaactgaaatgctta[137 bp omitted]tctgactctactaaaaatacaaaaattagccagacgtggtggcacacacctgtagtcccagctagtagggaggctgaggcaggagaattgcttgaacttgggaggcagaggttgtggtgagccgagatcgtgccattgcactccagccttcgtgacagagtgagacttcatctcaaaaaaaaaaagaaaaagaaaacttattcatcctaatgtttagttttcaaagggctttctgactacaatttgttaaaagttttaactcaacagaagaaaagttgtatttaaattaaagcaacttctgaagttccaga[137 bp omitted]cctccgcctcccaggttcaagcaattttcctgcctcagcctccagagtatctgggactgcaagtgcgtgccaccacactcagctaatttttgtatttttagtagagatggggtttcaccct[136 bp omitted]gcggtgggggggggcaaatgataaaaataacagagtctaagtagagattctagagaactaaaatttacttagtgtctacaatgagccaggtgttgtctcaagatttttttttttttcatagacaggaatctcagaatgttgcccaggctggcctcaaactcctgggctcaggtgatcttcctgcctcagcatcctgagtagctatggctacaggtgcgtgcccactgtgcctggcttgtcttaagggttttatgtgatgcttgccaagcatcagataggtcagaattagagccaggattcaaacttttattattttgattatgtagcatatgctttcccccaatatattgcatctcaaaatgcttctggtgatatagaagagtatgggtttgatctattaagtgtcactgttgataacagaacctcattgtaagtattttggtttttcacctagggtatcggtacagcaatcggagagctgcctccatatttcatggccagagcagctcgcctctcaggtgctgaaccagatgatgaagagtatcaggaatttgaagagatgctggaacatgcagagtctgcacaagtaagaacagtggggatagaaaatagaacactttacttcttcctaaagaggctattaaggtaaaattgttagtagttactctgaagaagaaaactgctaaagtaaaaaaaaaaaaaagaaagaaaaatattgcttgagatagaatatttagaaaggtcaaaatataaaagataatcttgatcttagaatagaaaaatgcaataagacaactcttaatacactaaaacaccttgtcagaaaccagggtaaattaatgttgccaatgatgttaaggagctgaaacttactttctccattatttgtttagaggtattaccaagcagactgctgctctgagtccaaaataatagaacttctgaattaattgttaaacataacatcaaaggacagatgtggtggctcactcctgtaatcccagcactttgagaacccgaggcaggaggattgcataagcgcaggagtttgaggctgcaagtgagctatgatcatcccactgtactctggcctaagcaacaggccctctctctaaaaaaaaaaaagaaagaaagaaagaaagaaatcttattttatggctatatctatagtggccctttcctcccttgaaagcagcttcattctgtattccacatagtgtgcagagctgctgaaatgtttgctagggaaatacatgaattatatcaaattcttaagtagttactaaaactttaaact
